(19) United States
(12) Patent Application Publication
(10) Pub. No.: US 2021/0284728 A1
(43) Pub. Date: Sep. 16, 2021

(54) DUAL BINDING MOIETY

(71) Applicant: HARPOON THERAPEUTICS, INC., South San Francisco, CA (US)

(72) Inventors: Shuoyen Jack LIN, San Bruno, CA (US); Richard J. AUSTIN, San Francisco, CA (US); Bryan D. LEMON, Mountain View, CA (US); Holger WESCHE, San Francisco, CA (US)

(21) Appl. No.: 17/055,100

(22) PCT Filed: May 14, 2019
(86) PCT No.: PCT/US2019/032302

§ 371 Date: Nov. 12, 2020

Related U.S. Application Data
(60) Provisional application No. 62/756,480, filed on Nov. 6, 2018.
(60) Provisional application No. 62/671,351, filed on May 14, 2018.

(51) Int. Cl. C07K 16/28; C07K 16/46; C07K 16/18; C07K 16/24

(52) U.S. Cl. CPC C07K 16/2809; C07K 16/468; C07K 16/18; A61K 2039/505; C07K 16/246; C07K 2319/35; C07K 16/2863

(57) ABSTRACT

Disclosed herein is a dual binding moiety that comprises non-CDR loops for masking the binding of a domain, such as a target antigen binding domain to its target, by steric occlusion and specific masking, and CDRs for binding bulk serum proteins. Pharmaceutical compositions comprising the dual binding moiety disclosed herein and methods of using such compositions are further provided.

### CROSS-REFERENCE

[0001] This application claims the benefit of U.S. Provisional Application Nos. 62/671,351 filed May 14, 2018 and 62/756,480 filed Nov. 6, 2018, each of which is incorporated by reference herein in its entirety.

### INCORPORATION BY REFERENCE

[0002] All publications, patents, and patent applications mentioned in this specification are herein incorporated by reference to the same extent as if each individual publication, patent, or patent application was specifically and individually indicated to be incorporated by reference, and as if set forth in their entireties.

### BACKGROUND OF THE INVENTION

[0003] There is a need to extend the half-life of a therapeutic, diagnostic, or imaging molecule in circulation and also improve its ability to reach its target within an intended location (e.g., a tumor cell) without non-specific binding.

### SUMMARY OF THE INVENTION

[0004] An embodiment of this disclosure provides a dual binding moiety comprising a non-CDR loop and a cleavable linker, wherein the moiety is capable of an interaction with a domain by specific binding or by steric occlusion, wherein upon the interaction between the moiety and the domain the moiety is capable of masking the domain from binding its target, and wherein upon cleavage of the linker the moiety is capable of unmasking the domain. In some embodiments, the moiety is further capable of an interaction with a half-life extending protein. In some embodiments, the moiety comprises a binding site specific for the domain. In some embodiments, the non-CDR loop provides the binding site specific for the domain. In some embodiments, the non-CDR loop comprises AB, C″D, EF, and CC′ loops and wherein the binding site specific for the domain is within the AB, C″D, EF, or CC′ loop. In some embodiments, the binding site specific for the domain is within the CC′ loop. In some embodiments, the binding site specific for the domain is introduced within the CC′ loop by mutagenesis. In some embodiments, the non-CDR loop comprises AB, C″D, EF, and CC′ loops and wherein a CD3 epitope is grafted into at least one of the AB, C″D, EF, and CC′ loops. In some embodiments, the CD3 binding epitope grafted into at least one of the AB, C″D, EF, and CC′ loops enables the moiety to mask binding of a CD3 binding domain to its target. In some embodiments, the moiety is capable of competitively binding to the CD3 binding domain in order to mask binding of the CD3 binding domain to its target. In some embodiments, the moiety is a natural peptide, a synthetic peptide, an engineered scaffold, or an engineered bulk serum protein. In some embodiments, the engineered scaffold comprises an sdAb, an scFv, an Fab, a VHH, a IgNAR, a VH, a VL, a fibronectin type III domain, an immunoglobulin-like scaffold, a bacterial albumin-binding domain, an adnectin, a monobody, an affibody, an affilin, an affimer, an affitin, an alphabody, an anticalin, an avimer, a centyrin, a DARPin, a cystine knot peptide, a lipocalin, a three-helix bundle scaffold, a protein G-related albumin-binding module, a DNA or RNA aptamer scaffold, or any combinations thereof. In some embodiments, the non-CDR-loop is from a variable domain, a constant domain, a C1-set domain, a C2-set domain, an I-domain, or any combinations thereof. In some embodiments, the dual binding moiety comprises albumin. In some embodiments, the moiety further comprises a complementarity determining region (CDR). In some embodiments, the moiety comprises a binding site specific for a bulk serum protein. In some embodiments, the bulk serum protein is albumin, transferrin, IgG1, IgG2, IgG4, IgG3, IgA monomer, Factor XIII, Fibrinogen, IgE, or pentameric IgM. In some embodiments, the moiety comprises a binding site specific for an immunoglobulin light chain. In some embodiments, the immunoglobulin light chain is an Igκ free light chain. In some embodiments, the CDR provides the binding site specific for the bulk serum protein or the immunoglobulin light chain. In some embodiments, the cleavable linker comprises a cleavage site. In some embodiments, the cleavage site is a protease cleavage site. In some embodiments, the domain is a target antigen binding domain, wherein the moiety is capable of masking the target antigen binding domain from binding to a tumor antigen. In some embodiments, the tumor antigen comprises EpCAM, EGFR, HER-3, c-Met, FoIR, PSMA, CD38, BCMA, and CEA. 5T4, AFP, B7-H3, CDH-6, CAIX, CD117, CD123, CD138, CD166, CD19, CD20, CD205, CD22, CD30, CD33, CD352, CD37, CD44, CD52, CD56, CD70, CD71, CD74, CD79b, DLL3, EphA2, FAP, FGFR2, FGFR3, GPC3, gpA33, FLT-3, gpNMB, HPV-16 E6, HPV-16 E7, ITGA2, ITGA3, SLC39A6, MAGE, mesothelin, Muc1, Muc16, NaPi2b, Nectin-4, CDH-3, CDH-17, EPHB2, ITGAV, ITGB6, NY-ESO-1, PRLR, PSCA, PTK7, ROR1, SLC44A4, SLITRK5, SLITRK6, STEAP1, TIM1, Trop2, or WT1. In some embodiments, the domain is a target antigen binding domain, wherein the moiety is capable of masking the target antigen binding domain from binding to an immune checkpoint protein. In some embodiments, the immune checkpoint protein is CD27, CD137, 2B4, TIGIT, CD155, ICOS, HVEM, CD40L, LIGHT, OX40, DNAM-1, PD-L1, PD1, PD-L2, CTLA-4, CD8, CD40, CEACAM1, CD48, CD70, A2AR, CD39, CD73, B7-H3, B7-H4, BTLA, IDO1, IDO2, TDO, KIR, LAG-3, TIM-3, or VISTA. In some embodiments, the domain is a target antigen binding domain, wherein the moiety is capable of masking the target antigen binding domain from binding an immune cell. In some embodiments, the domain is a target antigen binding domain, wherein the moiety is capable of masking the target antigen binding domain from binding a T-cell. In some embodiments, the protease cleavage site is recognized by a serine protease, a cysteine protease, an aspartate protease, a threonine protease, a glutamic acid protease, a metalloproteinase, a gelatinase, or a asparagine peptide lyase. In some embodiments, the protease cleavage site is recognized by a Cathepsin B, a Cathepsin C, a Cathepsin D, a Cathepsin E, a Cathepsin K, a Cathepsin L, a kallikrein, a hK1, a hK10, a hK15, a plasmin, a collagenase, a Type IV collagenase, a stromelysin, a Factor Xa, a chymotrypsin-like protease, a trypsin-like protease, a elastase-like protease, a subtilisin-like protease, an actinidain, a bromelain, a calpain, a caspase, a caspase-3, a Mir1-CP, a papain, a HIV-1 protease, a HSV protease, a CMV protease, a chymosin, a refill, a pepsin, a matriptase, a legumain, a plasmepsin, a nepenthesin, a metalloexopeptidase, a metalloendopeptidase, a matrix metalloprotease (MMP), a MMP1, a MMP2, a MMP3, a MMP7, a MMP8, a MMP9, a MMP10, a MMP11, a MMP12, a MMP13, a MMP14, an ADAMS, an ADAM10, an ADAM12, an urokinase plasminogen activator (uPA), an enterokinase, a prostate-specific target (PSA, hK3), an interleukin-1β converting enzyme, a thrombin, a FAP (FAP-α), a dipeptidyl peptidase, a type II transmembrane serine protease (TTSP), a neutrophil elastase, a cathepsin G, a proteinase 3, a neutrophil serine protease 4, a mast cell chymase, and a mast cell tryptase.

[0005] One embodiment provides a dual binding moiety comprising a non-CDR loop and a cleavable linker, wherein the moiety is capable of masking a target antigen binding domain from binding to its target. In some embodiments, the moiety is further capable of binding a half-life extending protein. In some embodiments, the moiety comprises a binding site specific for the target antigen binding domain. In some embodiments, the non-CDR loop provides the binding site specific for the target antigen binding domain. In some embodiments, the non-CDR loop comprises AB, C″D, EF, and CC′ loops and wherein the binding site specific for the target antigen binding domain is within the AB, C″D, EF, or CC′ loop. In some embodiments, the binding site specific for the target antigen binding domain is within the CC′ loop. In some embodiments, the binding site specific for the target antigen binding domain is introduced within the CC′ loop by mutagenesis. In some embodiments, the non-CDR loop comprises AB, C″D, EF, and CC′ loops and wherein a CD3 epitope is grafted into at least one of the AB, C″D, EF, and CC′ loops. In some embodiments, the CD3 binding epitope grafted into at least one of the AB, C″D, EF, and CC′ loops enables the moiety to mask binding of a CD3 binding domain to its target. In some embodiments, the moiety is capable of competitively binding to the CD3 binding domain in order to mask binding of the CD3 binding domain to its target. In some embodiments, the moiety is a natural peptide, a synthetic peptide, an engineered scaffold, or an engineered bulk serum protein. In some embodiments, the engineered scaffold comprises an sdAb, an scFv, an Fab, a VHH, a IgNAR, a VH, a VL, a fibronectin type III domain, an immunoglobulin-like scaffold, a bacterial albumin-binding domain, an adnectin, a monobody, an affibody, an affilin, an affimer, an affitin, an alphabody, an anticalin, an avimer, a centyrin, a DARPin, a cystine knot peptide, a lipocalin, a three-helix bundle scaffold, a protein G-related albumin-binding module, a DNA or RNA aptamer scaffold, or any combinations thereof. In some embodiments, the non-CDR-loop is from a variable domain, a constant domain, a C1-set domain, a C2-set domain, an I-domain, or any combinations thereof. In some embodiments, the moiety comprises albumin. In some embodiments, the moiety further comprises a complementarity determining region (CDR). In some embodiments, the moiety comprises a binding site specific for a bulk serum protein. In some embodiments, the bulk serum protein is albumin, transferrin, IgG1, IgG2, IgG4, IgG3, IgA monomer, Factor XIII, Fibrinogen, IgE, or pentameric IgM. In some embodiments, the moiety comprises a binding site specific for an immunoglobulin light chain. In some embodiments, the immunoglobulin light chain is an Igκ free light chain. In some embodiments, the CDR provides the binding site specific for the bulk serum protein or the immunoglobulin light chain. In some embodiments, the cleavable linker comprises a cleavage site In some embodiments, the cleavage site is a protease cleavage site. In some embodiments, the tumor antigen comprises EpCAM, EGFR, HER-2, HER-3, c-Met, FoIR, PSMA, CD38, BCMA, and CEA. 5T4, AFP, B7-H3, CDH-6, CAIX, CD117, CD123, CD138, CD166, CD19, CD20, CD205, CD22, CD30, CD33, CD352, CD37, CD44, CD52, CD56, CD70, CD71, CD74, CD79b, DLL3, EphA2, FAP, FGFR2, FGFR3, GPC3, gpA33, FLT-3, gpNMB, HPV-16 E6, HPV-16 E7, ITGA2, ITGA3, SLC39A6, MAGE, mesothelin, Muc1, Muc16, NaPi2b, Nectin-4, CDH-3, CDH-17, EPHB2, ITGAV, ITGB6, NY-ESO-1, PRLR, PSCA, PTK7, ROR1, SLC44A4, SLITRK5, SLITRK6, STEAP1, TIM1, Trop2, or WT1. In some embodiments, the tumor antigen comprises at least one of: EpCAM (exemplary protein sequences comprise UniProtkB ID No. P16422, B5MCA4), EGFR (exemplary protein sequence comprises UniProtkB ID No. P00533), HER-2 (exemplary protein sequence comprises UniProtkB ID No. P04626), HER-3 (exemplary protein sequence comprises UniProtkB ID No. P21860), c-Met (exemplary protein sequence comprises UniProtkB ID No. P08581), FoIR (exemplary protein sequence comprises UniProtkB ID No. P15238), PSMA (exemplary protein sequence comprises UniProtkB ID No. Q04609), CD38 (exemplary protein sequence comprises UniProtkB ID No. P28907), BCMA (exemplary protein sequence comprises UniProtkB ID No. Q02223), and CEA (exemplary protein sequence comprises UniProtkB ID No. P06731, 5T4 (exemplary protein sequence comprises UniProtkB ID No. Q13641), AFP (exemplary protein sequence comprises UniProtkB ID No. P02771), B7-H3 (exemplary protein sequence comprises UniProtkB ID No. Q5ZPR3), CDH-6 (exemplary protein sequence comprises UniProtkB ID No. P97326), CAIX (exemplary protein sequence comprises UniProtkB ID No. Q16790), CD117 (exemplary protein sequence comprises UniProtkB ID No. P10721), CD123 (exemplary protein sequence comprises UniProtkB ID No. P26951), CD138 (exemplary protein sequence comprises UniProtkB ID No. P18827), CD166 (exemplary protein sequence comprises UniProtkB ID No. Q13740), CD19 (exemplary protein sequence comprises UniProtkB ID No. P15931), CD20 (exemplary protein sequence comprises UniProtkB ID No. P11836), CD205 (exemplary protein sequence comprises UniProtkB ID No. 060449), CD22 (exemplary protein sequence comprises UniProtkB ID No. P20273), CD30 (exemplary protein sequence comprises UniProtkB ID No. P28908), CD33 (exemplary protein sequence comprises UniProtkB ID No. P20138), CD352 (exemplary protein sequence comprises UniProtkB ID No. Q96DU3), CD37 (exemplary protein sequence comprises UniProtkB ID No. P11049), CD44 (exemplary protein sequence comprises UniProtkB ID No. P16070), CD52 (exemplary protein sequence comprises UniProtkB ID No. P31358), CD56 (exemplary protein sequence comprises UniProtkB ID No. P13591), CD70 (exemplary protein sequence comprises UniProtkB ID No. P32970), CD71 (exemplary protein sequence comprises UniProtkB ID No. P02786), CD74 (exemplary protein sequence comprises UniProtkB ID No. P04233), CD79b (exemplary protein sequence comprises UniProtkB ID No. P40259), DLL3 (exemplary protein sequence comprises UniProtkB ID No. Q9NYJ7), EphA2 (exemplary protein sequence comprises UniProtkB ID No. P29317), FAP (exemplary protein sequence comprises UniProtkB ID No. Q12884), FGFR2 (exemplary protein sequence comprises UniProtkB ID No. P21802), FGFR3 (exemplary protein sequence comprises UniProtkB ID No. P22607), GPC3 (exemplary protein sequence comprises UniProtkB ID No. P51654), gpA33 (exemplary protein sequence comprises UniProtkB ID No. Q99795), FLT-3 (exemplary protein sequence comprises UniProtkB ID No. P36888), gpNMB (exemplary protein sequence comprises UniProtkB ID No. Q14956), HPV-16 E6 (exemplary protein sequence comprises UniProtkB ID No. P03126), HPV-16 E7 (exemplary protein sequence comprises UniProtkB ID No. P03129), ITGA2 (exemplary protein sequence comprises UniProtkB ID No. P17301), ITGA3 (exemplary protein sequence comprises UniProtkB ID No. P26006), SLC39A6 (exemplary protein sequence comprises UniProtkB ID No. Q13433), MAGE (exemplary protein sequence comprises UniProtkB ID No. Q9HC15), mesothelin (exemplary protein sequence comprises UniProtkB ID No. Q13421), Muc1 (exemplary protein sequence comprises UniProtkB ID No. P15941), Muc16 (exemplary protein sequence comprises UniProtkB ID No. Q8WX17), NaPi2b (exemplary protein sequence comprises UniProtkB ID No. 095436), Nectin-4 (exemplary protein sequence comprises UniProtkB ID No. Q96918), CDH-3 (exemplary protein sequence comprises UniProtkB ID No. Q8WX17), CDH-17 (exemplary protein sequence comprises UniProtkB ID No. E5RJT3), EPHB2 (exemplary protein sequence comprises UniProtkB ID No. P29323), ITGAV (exemplary protein sequence comprises UniProtkB ID No. P06756), ITGB6 (exemplary protein sequence comprises UniProtkB ID No. P18564), NY-ESO-1 (exemplary protein sequence comprises UniProtkB ID No. P78358), PRLR (exemplary protein sequence comprises UniProtkB ID No. P16471), PSCA (exemplary protein sequence comprises UniProtkB ID No. 043653), PTK7 (exemplary protein sequence comprises UniProtkB ID No. Q13308), ROR1 (exemplary protein sequence comprises UniProtkB ID No. Q01973), SLC44A4 (exemplary protein sequence comprises UniProtkB ID No. Q53GD3), SLITRK5 (exemplary protein sequence comprises UniProtkB ID No. Q81W52), SLITRK6 (exemplary protein sequence comprises UniProtkB ID No. Q9HY7), STEAP1 (exemplary protein sequence comprises UniProtkB ID No. Q9UHE8), TIM1 (exemplary protein sequence comprises UniProtkB ID No. Q96D42), Trop2 (exemplary protein sequence comprises UniProtkB ID No. P09758), or WT1 (exemplary protein sequence comprises UniProtkB ID No. P19544), or any combinations thereof. In some embodiments, the moiety is capable of masking the target antigen binding domain from binding to a tumor antigen. In some embodiments, the moiety is capable of masking the target antigen binding domain from binding to an immune checkpoint protein. In some embodiments, the immune checkpoint protein is at least one of: CD27 (exemplary protein sequence comprises UniProtkB ID No. P26842), CD137 (exemplary protein sequence comprises UniProtkB ID No. Q07011), 2B4 (exemplary protein sequence comprises UniProtkB ID No. Q9bZW8), TIGIT (exemplary protein sequence comprises UniProtkB ID No. Q495A1), CD155 (exemplary protein sequence comprises UniProtkB ID No. P15151), ICOS (exemplary protein sequence comprises UniProtkB ID No. Q9Y6W8), HVEM (exemplary protein sequence comprises UniProtkB ID No. 043557), CD40L (exemplary protein sequence comprises UniProtkB ID No. P29965), LIGHT (exemplary protein sequence comprises UniProtkB ID No. 043557), OX40 (exemplary protein sequence comprises UniProtkB ID No.), DNAM-1 (exemplary protein sequence comprises UniProtkB ID No. Q15762), PD-L1 (exemplary protein sequence comprises UniProtkB ID No. Q9ZQ7), PD1 (exemplary protein sequence comprises UniProtkB ID No. Q15116), PD-L2 (exemplary protein sequence comprises UniProtkB ID No. Q9BQ51), CTLA-4 (exemplary protein sequence comprises UniProtkB ID No. P16410), CD8 (exemplary protein sequence comprises UniProtkB ID No. P10966, P01732), CD40 (exemplary protein sequence comprises UniProtkB ID No. P25942), CEACAM1 (exemplary protein sequence comprises UniProtkB ID No. P13688), CD48 (exemplary protein sequence comprises UniProtkB ID No. P09326), CD70 (exemplary protein sequence comprises UniProtkB ID No. P32970), AA2AR (exemplary protein sequence comprises UniProtkB ID No. P29274), CD39 (exemplary protein sequence comprises UniProtkB ID No. P49961), CD73 (exemplary protein sequence comprises UniProtkB ID No. P21589), B7-H3 (exemplary protein sequence comprises UniProtkB ID No. Q5ZPR3), B7-H4 (exemplary protein sequence comprises UniProtkB ID No. Q7Z7D3), BTLA (exemplary protein sequence comprises UniProtkB ID No. Q76A9), IDO1 (exemplary protein sequence comprises UniProtkB ID No. P14902), IDO2 (exemplary protein sequence comprises UniProtkB ID No. Q6ZQW0), TDO (exemplary protein sequence comprises UniProtkB ID No. P48755), KIR (exemplary protein sequence comprises UniProtkB ID No. Q99706), LAG-3 (exemplary protein sequence comprises UniProtkB ID No. P18627), TIM-3 (also known as HAVCR2, exemplary protein sequence comprises UniProtkB ID No. Q8TDQ0), or VISTA (exemplary protein sequence comprises UniProtkB ID No. Q9D659) In some embodiments, the moiety is capable of masking the target antigen binding domain from binding an immune cell. In some embodiments, the moiety is capable of masking the target antigen binding domain from binding a T-cell. In some embodiments, the protease cleavage site is recognized by a serine protease, a cysteine protease, an aspartate protease, a threonine protease, a glutamic acid protease, a metalloproteinase, a gelatinase, or a asparagine peptide lyase. In some embodiments, the protease cleavage site is recognized by a Cathepsin B, a Cathepsin C, a Cathepsin D, a Cathepsin E, a Cathepsin K, a Cathepsin L, a kallikrein, a hK1, a hK10, a hK15, a plasmin, a collagenase, a Type IV collagenase, a stromelysin, a Factor Xa, a chymotrypsin-like protease, a trypsin-like protease, a elastase-like protease, a subtilisin-like protease, an actinidain, a bromelain, a calpain, a caspase, a caspase-3, a Mir1-CP, a papain, a HIV-1 protease, a HSV protease, a CMV protease, a chymosin, a renin, a pepsin, a matriptase, a legumain, a plasmepsin, a nepenthesin, a metalloexopeptidase, a metalloendopeptidase, a matrix metalloprotease (MMP), a MMP1, a MMP2, a MMP3, a MMP7, a MMP8, a MMP9, a MMP10, a MMP11, a MMP12, a MMP13, a MMP14, an ADAM9, an ADAM10, an ADAM12, an urokinase plasminogen activator (uPA), an enterokinase, a prostate-specific target (PSA, hK3), an interleukin-1β converting enzyme, a thrombin, a FAP (FAP-11), a dipeptidyl peptidase, a type II transmembrane serine protease (TTSP), a neutrophil elastase, a cathepsin G, a proteinase 3, a neutrophil serine protease 4, a mast cell chymase, and a mast cell tryptase. In some embodiments, the protease cleavage site is recognized by a Cathepsin B, a Cathepsin C, a Cathepsin D, a Cathepsin E, a Cathepsin K, a Cathepsin L, a kallikrein, a hK1, a hK10, a hK15, a plasmin, a collagenase, a Type IV collagenase, a stromelysin, a Factor Xa, a chymotrypsin-like protease, a trypsin-like protease, a elastase-like protease, a subtilisin-like protease, an actinidain, a bromelain, a calpain, a caspase, a caspase-3, a Mir1-CP, a papain, a HIV-1 protease, a HSV protease, a CMV protease, a chymosin, a renin, a pepsin, a matriptase, a legumain, a plasmepsin, a nepenthesin, a metalloexopeptidase, a metalloendopeptidase, a matrix metalloprotease (MMP), a MMP1, a MMP2, a MMP3, a MMP7, a MMP8, a MMP9, a MMP10, a MMP11, a MMP12, a MMP13, a MMP14, an ADAMS, an ADAM10, an ADAM12, an urokinase plasminogen activator (uPA), an enterokinase, a prostate-specific target (PSA, hK3), an interleukin-1β converting enzyme, a thrombin, a FAP (FAP-α), a dipeptidyl peptidase, a type II transmembrane serine protease (TTSP), a neutrophil elastase, a cathepsin G, a proteinase 3, a neutrophil serine protease 4, a mast cell chymase, and a mast cell tryptase.

[0006] In some embodiments, the moiety is capable of an interaction with the target antigen binding domain by specific binding or by steric occlusion, wherein the interaction between the moiety and the target antigen binding domain enables the masking of the target antigen binding domain from binding to its target. In some embodiments, upon cleavage of the linker the moiety is capable of unmasking the target antigen binding domain whereby the target antigen binding domain is capable of binding to its target. In some embodiments, the dual binding moiety comprises two or more polypeptides linked by a non-cleavable linker. In some embodiments, the CDRs and the non-CDR loops are in separate polypeptides. In some embodiments, the CDRs and the non-CDR loops are in a first polypeptide and wherein a second polypeptide comprises residue for extending the non-CDR loops.

[0007] In some embodiments, the dual binding moiety comprises an Ig, an Ig-like scaffold, a beta-sandwich scaffold, or a non beta-sandwich scaffold. In some embodiments, the dual binding moiety comprises a non-CDR loops that comprises a CC′ loop of at least one of: a camelid VHH domain, a human VH domain, a humanized VH domain, or a single domain antibody. In some embodiments, the moiety comprises a binding site specific for a CD3ε domain, and wherein the binding site for the CD3ε domain comprises at least one of the following motifs: QDGNE, QDGNEE, DGNE, and DGNEE.

### BRIEF DESCRIPTION OF THE DRAWINGS

[0008] The novel features of the invention are set forth with particularity in the appended claims. A better understanding of the features and advantages of the present invention will be obtained by reference to the following detailed description that sets forth illustrative embodiments, in which the principles of the invention are utilized, and the accompanying drawings of which.

[0009] FIG. 1 illustrates a variable domain of an exemplary immunoglobulin domain, comprising complementarity determining regions (CDR1, CDR2, and CDR3), and non-CDR loops connecting the beta strand (AB, CC′, C″ D, EF, and DE).

[0010] FIGS. 2A-2B provide exemplary arrangements of various domains of a conditionally active binding protein of this disclosure. FIG. 2A: Version 1. FIG. 2B: Version 2.

[0011] FIG. 3 shows an exemplary conditionally active target binding protein of this disclosure.

[0012] FIGS. 4A-4B show activation and possible mode of action of trispecific molecules (ProTriTAC). FIG. 4A shows ProTriTAC molecules in circulation, in tumor environment, and in circulation. FIG. 4B shows exemplary sequence for the protease cleavable site in a linker tethered to an anti-albumin dual binding moiety and an SDS-PAGE gel showing the ProTriTAC in its activatable (prodrug) and activated (active drug) states.

[0013] FIG. 5 shows a schematic flowchart for manufacturing a ProTriTAC molecule and an SDS-PAGE gel showing three purified ProTriTAC molecules.

[0014] FIGS. 6A-6B show analytical size exclusion chromatograms on a ProTriTAC molecule exposed to different stress conditions in graph form in FIG. 6A with the corresponding data in FIG. 6B.

[0015] FIG. 7 shows protease-dependent, anti-tumor activity of exemplary ProTriTAC molecules in HCT116 Colorectal Tumor Xenograft Model in NSG Mice.

[0016] FIGS. 8A-8D show various designs of exemplary ProTriTAC and control molecules. FIG. 8A illustrates an exemplary Control #1. FIG. 8B illustrates an exemplary Control #2.

[0017] FIG. 8C illustrates an exemplary ProTriTAC molecule. FIG. 8D illustrates an exemplary activated ProTriTAC molecule.

[0018] FIG. 9 shows pharmacokinetic profiles for exemplary ProTriTAC and control molecules.

[0019] FIG. 10 shows conversion of an exemplary prodrug ProTriTAC molecule into an active drug with the empirical half-lives.

[0020] FIG. 11 shows plasma clearance of an exemplary ProTriTAC molecule and its converted active drug format.

[0021] FIG. 12 shows CD3 binding potential of an exemplary ProTriTAC molecule, its converted active drug format, and a control non-cleavable ProTriTAC molecule.

[0022] FIG. 13 shows human primary T cell binding potential of an exemplary ProTriTAC molecule, its converted active drug format, and a control non-cleavable ProTriTAC molecule.

[0023] FIG. 14 shows T cell killing potential of an exemplary ProTriTAC molecule, its converted active drug format, and a control non-cleavable ProTriTAC molecule.

[0024] FIG. 15 shows the schematic structure of an exemplary trispecific molecule containing a dual binding moiety as described herein (also referred to herein as ProTriTAC or activatable ProTriTAC).

[0025] FIG. 16A-16E shows exemplary schematic structures for Prodrug molecules combining functional masking and half-life extension. FIG. 16A shows a ProDrug molecule comprising an anti-albumin moiety which includes a masking moiety, and a cleavable linker connecting the anti-albumin moiety and the drug. FIG. 16B shows a ProDrug molecule comprising an anti-albumin moiety comprising two peptide motifs linked by linker, one of which includes a masking moiety, and a cleavable linker connecting the albumin binding moiety to a drug. FIG. 16C shows a ProDrug molecule comprising a modified albumin (containing a masking moiety) linked to a drug by a cleavable linker. FIG. 16D shows a ProDrug molecule comprising a modified albumin (containing a masking moiety and a protease cleavage site) linked to a drug. FIG. 16E shows an activated ProDrug. In each schematic structure (FIGS. 16A-16D) the drug molecule is functionally masked by the anti-albumin moiety or the modified albumin from binding its target or from being activated at an undesired site or from binding at non-target sites and thereby creating a drug sink.

[0026] FIGS. 17A-17E show exemplary schematic structures for ProTriTAC molecules combining functional masking and half-life extension. FIG. 17A shows a ProTriTAC molecule comprising an anti-albumin moiety which includes a masking moiety, and a cleavable linker connecting the anti-albumin moiety and a T cell engager molecule. FIG. 17B shows a ProTriTAC molecule comprising an anti-albumin moiety comprising two peptide motifs linked by linker, one of which includes a masking moiety, and a cleavable linker connecting the albumin binding moiety to a T cell engager molecule. FIG. 17C shows a ProTriTAC molecule comprising a modified albumin (containing a masking moiety) linked to a T cell engager by a cleavable linker. FIG. 17D shows a ProTriTAC molecule comprising a modified albumin (containing a masking moiety and a protease cleavage site) linked to a T cell engager. FIG. 17E shows an activated ProTriTAC. In each schematic structure (FIGS. 17A-17D) a target binding interface within the ProTriTAC molecule is functionally masked by the anti-albumin moiety or the modified albumin from binding its target or from being activated at an undesired site or from binding at non-target sites and thereby creating a sink.

[0027] FIG. 18 shows anti-tumor activity of exemplary ProTriTAC molecules and TriTAC molecules of this disclosure.

[0028] FIG. 19 shows pharmacokinetic profile of exemplary ProTriTAC molecules and TriTAC molecules of this disclosure.

[0029] FIGS. 20A-20F show admix xenograft individual tumor volumes following administering exemplary ProTriTAC molecules or TriTAC molecules of this disclosure. FIG. 20A illustrates results from a GFP TriTAC. FIG. 20B. illustrates results from EGFR ProTriTAC (NCLV). FIG. 20C illustrates results from EGFR ProTriTAC (L001). FIG. 20D illustrates results from EGFR ProTriTAC (L041). FIG. 20E illustrates results from EGFR ProTriTAC (L040). FIG. 20F illustrates results from EGFR ProTriTAC (L045).

[0030] FIGS. 21A-21C shows cytokine levels (IFN-gamma (FIG. 21A), IL-6 (FIG. 21B), and IL-10 (FIG. 21C)) following administering exemplary ProTriTAC molecules or TriTAC molecules of this disclosure.

[0031] FIGS. 22A-22E show body weight percent change in mice, following administering exemplary ProTriTAC molecules and TriTAC molecules of this disclosure. FIG. 22A illustrates results of 30 μg/kg; FIG. 22B illustrates results of 100 μg/kg; FIG. 22C illustrates results of 300 μg/kg; FIG. 22D illustrates results of 1000 μg/kg; and FIG. 22E provides fold protection at the various concentrations.

[0032] FIGS. 23A-23C shows body weight percent change in mice, following administering varying concentrations of exemplary ProTriTAC molecules of this disclosure, containing non-cleavable or cleavable linkers. FIG. 23A illustrates results of 300 μg/kg; FIG. 23B illustrates results of 1000 μg/kg; FIG. 23C provides fold protection at the various concentrations.

[0033] FIGS. 24A-24C show serum concentrations of aspartate aminotransferase (AST), in mice, following administering varying concentrations of a ProTriTAC molecule containing a non-cleavable linker (ProTriTAC (NCLV)) (FIG. 24C), a TriTAC molecule (FIG. 24A), or a ProtriTAC molecule (FIG. 24B) containing a cleavable linker.

[0034] FIGS. 25A-25C show serum concentrations of alanine aminotransferase (ALT), in mice, following administering varying concentrations of a ProTriTAC molecule containing a non-cleavable linker (ProTriTAC (NCLV)) (FIG. 25C), a TriTAC molecule (FIG. 25A), or a ProtriTAC molecule (FIG. 25B) containing a cleavable linker.

[0035] FIGS. 26A-26B show serum concentrations of ALT (right panel; FIG. 26B) or AST (left pane; FIG. 26A), in cynomolgus monkeys, following administering varying concentrations of an EGFR ProTriTAC molecule, or an EGFR ProTriTAC (NCLV) molecule.

[0036] FIGS. 27A-27D show tumor volume in mice following administration of a GFP TriTAC molecule, an EGFR TriTAC molecule, or an EGFR ProTriTAC molecule, in varying concentrations. FIG. 27A shows GFP TriTAC (at 300 μg/kg) and an EGFR TriTAC (at 10 μg/kg). FIG. 27B shows the EGFR TriTAC (at 30 μg/kg and at 100 μg/kg). FIG. 27C shows the EGFR TriTAC (at 300 μg/kg) and an EGFR ProTriTAC (at 30 μg/kg and 100 μg/kg). FIG. 27D shows the EGFR ProTriTAC (at 300 μg/kg and 1000 μg/kg)

[0037] FIG. 28 shows serum concentrations of ALT and AST, in mice, following administration of varying concentrations of a GFP TriTAC, an EGFR TriTAC, and an EGFR ProTriTAC molecule.

[0038] FIG. 29 shows grafting of a CD3ε epitope into the CC′ loop of a dual binding moiety of this disclosure. HuCD3e: SEQ ID NO: 971; CC10: SEQ ID NO: 260; CC12: SEQ ID NO: 259; and CC16: SEQ ID NO: 261.

[0039] FIG. 30 shows separation of a dual binding moiety of this disclosure, from a ProTriTAC molecule that contained the dual binding moiety, upon tumor associated protease activation by matriptase.

[0040] FIG. 31 shows CD3 binding of ProTriTAC molecules, with or without activation, containing an exemplary dual binding moiety of this disclosure.

[0041] FIG. 32 shows cell killing potential of a ProTriTAC molecule, with or without activation, containing an exemplary dual binding moiety of this disclosure.

[0042] FIG. 33 shows the soft library mutagenesis approach carried out to explore the non-CDR loops within an exemplary dual binding moiety of this disclosure.

[0043] FIGS. 34A-34B illustrate the results of the soft library mutagenesis approach carried out to explore the non-CDR loops within an exemplary dual binding moiety of this disclosure in a naiive library (FIG. 34A) and after panning against HSA (human serum albumin or also referred to herein as albumin; FIG. 34B).

[0044] FIG. 35 illustrates that a dual binding moiety of this disclosure is able to expand the therapeutic window of a molecule containing it (e.g., a ProTriTAC molecule or a ProCAR) by both steric masking and specific masking.

[0045] FIG. 36 illustrates an exemplary arrangement of a target antigen binding domain (aTarget 1), cleavable linker, and a dual binding moiety (aTarget 2) of the present disclosure.

[0046] FIG. 37 illustrates an example of a conditionally active receptor as described herein.

[0047] FIGS. 38A-38E show examples of receptor constructs which were generated as disclosed herein used in Examples 26-30. Each construct comprises an intracellular domain comprising a CD8 hinge/transmembrane domain (SEQ ID NO: 823), a 4-1BB intracellular domain (SEQ ID NO: 824), and a CD3 zeta intracellular domain (SEQ ID NO: 825). Construct C1081 (SEQ ID NO: 804; FIG. 38A) does not comprise a target antigen binding domain or a dual binding moiety. Construct C1824 (SEQ ID NO: 805; FIG. 38B) comprises the target antigen binding domain EH4 (an anti-EGFR binding domain) (SEQ ID NO: 821) but does not comprise a dual binding moiety. Construct 1826 (SEQ ID NO: 806; FIG. 38C) comprises target antigen binding domain EH4 and the dual binding moiety 10G with an unmodified non-CDR loop (SEQ ID NO: 817) along with a non-cleavable linker (SEQ ID NO: 826). Construct 1950 (SEQ ID NO: 807; FIG. 38D) comprises target antigen binding domain EH4 and dual binding moiety 10G with a modified non-CDR loop (SEQ ID NO: 818) along with a non-cleavable linker (SEQ ID NO: 826). Construct 2031 (SEQ ID NO: 808; FIG. 38E) comprises target antigen binding domain EH4 and dual binding moiety 10G with a modified non-CDR loop (SEQ ID NO: 818) along with protease cleavable linker 1 (SEQ ID NO: 827).

[0048] FIG. 39 shows results from experiments described in Example 26.

[0049] FIG. 40 shows results from experiments described in Example 27.

[0050] FIGS. 41A-C show results from experiments described in Example 28 for low (FIG. 41A), medium (FIG. 41B), and high (FIG. 41C) CAR expression based on anti-FLAG staining.

[0051] FIG. 42 shows results from experiments described in Example 29.

[0052] FIG. 43 shows results from experiments in Example 30.

[0053] FIGS. 44A-4411 show examples of receptor constructs which were generated as disclosed herein. Construct C1081 (SEQ ID NO: 804; FIG. 44A) does not comprise a target antigen binding domain or a dual binding moiety. Construct 1827 (SEQ ID NO: 809; FIG. 44B) comprises the target antigen binding domain EH104 (SEQ ID NO: 822) but does not comprise a dual binding moiety. Construct 1829 (SEQ ID NO: 810; FIG. 44C) comprises target antigen binding domain EH104 (an anti-EGFR binding domain) and the dual binding moiety 10G with an unmodified non-CDR loop (SEQ ID NO: 817) along with a non-cleavable linker (SEQ ID NO: 826). Construct 1952 (SEQ ID NO: 811; FIG. 44D) comprises target antigen binding domain EH104 and dual binding moiety 10G with a modified non-CDR loop (SEQ ID NO: 819) along with a non-cleavable linker (SEQ ID NO: 826). Construct 1954 (SEQ ID NO: 812; FIG. 44E) comprises target antigen binding domain EH104 and dual binding moiety 10G with a modified non-CDR loop (SEQ ID NO: 59) along with a non-cleavable linker (SEQ ID NO: 820). Construct 2033 (SEQ ID NO: 813; FIG. 44F) comprises target antigen binding domain EH104 and dual binding moiety 10G with a modified non-CDR loop (SEQ ID NO: 819) along with protease cleavable linker 1 (SEQ ID NO: 827). Construct 1953 (SEQ ID NO: 814; FIG. 44G) comprises target antigen binding domain EH104 and dual binding moiety 10G with a modified non-CDR loop (SEQ ID NO: 820) along with protease cleavable linker 2 (SEQ ID NO: 828). Construct 2035 (SEQ ID NO: 815; FIG. 44H) comprises target antigen binding domain EH104 and dual binding moiety 10G with a modified non-CDR loop (SEQ ID NO: 820) along with protease cleavable linker 1 (SEQ ID NO: 827).

[0054] FIG. 45 shows results from experiments described in Example 31.

[0055] FIG. 46 shows results from experiments described in Example 32.

[0056] FIGS. 47A-C show results from experiments described in Example 33 for low (FIG. 47A), medium (FIG. 47B), and high (FIG. 47C) CAR expression based on anti-FLAG staining.

[0057] FIGS. 48A-48C show results from experiments described in Example 34 for low (FIG. 48A), medium (FIG. 48B), and high (FIG. 49C) CAR expression based on anti-FLAG staining.

[0058] FIG. 49 shows results from experiments described in Example 35.

[0059] FIG. 50 shows results from experiments described in Example 36.

[0060] FIG. 51 shows results from experiments described in Example 37.

[0061] FIGS. 52A-E show exemplary ProCAR constructs. FIG. 52A illustrates construct C2446 which includes an anti-human serine albumin sdAb, a protease cleavage site 3, an anti-human EGFR sdAb, a FLAG epitope, a CD8 hinge/transmembrane domain, a 4-1BB intracellular domain, and a CD3 zeta intracellular domain (SEQ ID NO: 832). FIG. 52B illustrates construct C2510 which includes an anti-human serine albumin sdAb, a protease cleavage site, an anti-human EGFR sdAb, a FLAG epitope, a dimerization-deficient CD8a hinge/transmembrane domain, a 4-1BB intracellular domain, and a CD3 zeta intracellular domain (SEQ ID NO: 834). FIG. 52C illustrates construct C2513 which includes an anti-human serine albumin sdAb, a protease cleavage site 3, an anti-human EGFR sdAb, a FLAG epitope, a dimerization-deficient CD8a hinge/transmembrane domain, a 4-1BB intracellular domain, and a CD3 zeta intracellular domain (SEQ ID NO: 835). FIG. 52D illustrates construct C2514 which includes an anti-human serine albumin sdAb, an anti-human EGFR sdAb, a FLAG epitope, a dimerization-deficient CD8a hinge/transmembrane domain, a 4-1BB intracellular domain, and a CD3 zeta intracellular domain (SEQ ID NO: 836). FIG. 52E illustrates construct C2448, which includes an anti-human EGFR sdAb, a FLAG epitope, a dimerization-deficient CD8a hinge/transmembrane domain, a 4-1BB intracellular domain, and a CD3 zeta intracellular domain (SEQ ID NO: 833).

[0062] FIGS. 53A-53B show that the level of protease site-dependent cell killing activity of the ProCARs constructs. The level of protease site-dependent cell killing activity of the ProCARs constructs was reduced by eliminating the dimerization activity of the CD8a transmembrane domain (FIG. 53B) compared to wild-type (FIG. 53A).

[0063] FIG. 54 shows that the dimerization deficient EGFR CAR ad similar cell killing activity compared to wild-type.

[0064] FIGS. 55A-55G show exemplary ProCAR constructs. FIG. 55A illustrates construct C2483 which includes an anti-human EpCAM sdAb, a FLAG epitope, a CD8 hinge/transmembrane domain, a 4-1BB intracellular domain, and a CD3 zeta intracellular domain (SEQ ID NO: 838). FIG. 55B illustrates construct C2790 which includes an anti-human serum albumin sdAb, an anti-human EpCAM sdAb, a FLAG epitope, a CD8 hinge/transmembrane domain, a 4-1BB intracellular domain, and a CD3 zeta intracellular domain (SEQ ID NO: 839). FIG. 55C illustrates construct C3269 which includes an anti-human serum albumin sdAb that contains a mask in the CC′ loop, an anti-human EpCAM sdAb, a FLAG epitope, a CD8 hinge/transmembrane domain, a 4-1BB intracellular domain, and a CD3 zeta intracellular domain (SEQ ID NO: 840). FIG. 55D illustrates construct C3272 which includes an anti-human serum albumin sdAb that contains a mask in the CC′ loop, an anti-human EpCAM sdAb, a FLAG epitope, a CD8 hinge/transmembrane domain, a 4-1BB intracellular domain, and a CD3 zeta intracellular domain (SEQ ID NO: 841). FIG. 55E illustrates construct C3329 which includes an anti-human serum albumin sdAb, a protease cleavage site 3, an anti-human EpCAM sdAb, a FLAG epitope, a CD8 hinge/transmembrane domain, a 4-1BB intracellular domain, and a CD3 zeta intracellular domain (SEQ ID NO: 843).

[0065] FIG. 55F illustrates construct C3328 which includes an anti-human serum albumin sdAb that contains a mask in the CC′ loop, a protease cleavage site 3, an anti-human EpCAM sdAb, a FLAG epitope, a CD8 hinge/transmembrane domain, a 4-1BB intracellular domain, and a CD3 zeta intracellular domain (SEQ ID NO: 842). FIG. 55G illustrates construct C2780 which includes an anti-GFP sdAb, a FLAG epitope, a CD8 hinge/transmembrane domain, a 4-1BB intracellular domain, and a CD3 zeta intracellular domain (SEQ ID NO: 837).

[0066] FIG. 56 demonstrates steric blocking of anti-EpCAM sdAb H90 ProCAR-T cell killing activity by HSA when assayed at ratios 10:1, 5:1, 2.5:1, and 1.25:1 CAR-T:Target cells.

[0067] FIGS. 57A-57C provide histograms of EpCAM-Fc/Alexa Fluor 647 staining of CAR-T cells from FIG. 55 that have been grouped into low (FIG. 57A), medium (FIG. 57B), or high (FIG. 57C) CAR expression based on anti-FLAG staining that demonstrate the efficacy of EpCAM mask 1 in blocking ProCAR EpCAM-binding activity.

[0068] FIGS. 58A-58C provide histograms of EpCAM-Fc/Alexa Fluor 647 staining of CAR-T cells from FIG. 55 that have been grouped into low (FIG. 58A), medium (FIG. 58B), or high (FIG. 58C) CAR expression based on anti-FLAG staining that demonstrate the efficacy of EpCAM mask 2 in blocking ProCAR EpCAM-binding activity.

[0069] FIG. 59 demonstrates masking of the anti-EpCAM sdAb H90 of constructs of FIG. 55 at ratios 10:1, 5:1, 2.5:1, and 1.25:1 CAR-T:Target cells.

[0070] FIG. 60 demonstrates protease site-dependent activation of EpCAM ProCAR mask 2 cell killing activity.

[0071] FIGS. 61A-61C illustrate protease activation of EpCAM Mask 1 ProCAR antigen binding activity at low (FIG. 61A), medium (FIG. 61B), or high (FIG. 61C) CAR expression based on anti-FLAG staining.

[0072] FIGS. 62A-62C illustrate protease activation of EpCAM Mask 2 ProCAR antigen binding activity at low (FIG. 62A), medium (FIG. 62B), or high (FIG. 62C) CAR expression based on anti-FLAG.

[0073] FIGS. 63A-63C show body weight percent change in mice, following administering exemplary EpCAM ProTriTAC molecules (EpCAM ProTriTAC containing linker L040 in FIG. 63B; EpCAM ProTriTAC containing a non-cleavable linker in FIG. 63C) and EpCAM TriTAC molecules (FIG. 63A) of this disclosure.

### DETAILED DESCRIPTION OF THE INVENTION

[0074] While preferred embodiments of the present invention have been shown and described herein, it will be obvious to those skilled in the art that such embodiments are provided by way of example only. Numerous variations, changes, and substitutions will now occur to those skilled in the art without departing from the invention. It should be understood that various alternatives to the embodiments of the invention described herein may be employed in practicing the invention. It is intended that the following claims define the scope of the invention and that methods and structures within the scope of these claims and their equivalents be covered thereby

### Certain Definitions

[0075] The terminology used herein is for the purpose of describing particular cases only and is not intended to be limiting. As used herein, the singular forms “a”, “an” and “the” are intended to include the plural forms as well, unless the context clearly indicates otherwise. Furthermore, to the extent that the terms “including”, “includes”, “having”, “has”, “with”, or variants thereof are used in either the detailed description and/or the claims, such terms are intended to be inclusive in a manner similar to the term “comprising.”

[0076] The term “about” or “approximately” means within an acceptable error range for the particular value as determined by one of ordinary skill in the art, which will depend in part on how the value is measured or determined, e.g., the limitations of the measurement system. For example, “about” can mean within 1 or more than 1 standard deviation, per the practice in the given value. Where particular values are described in the application and claims, unless otherwise stated the term “about” should be assumed to mean an acceptable error range for the particular value.

[0077] The terms “individual,” “patient,” or “subject” are used interchangeably. None of the terms require or are limited to situation characterized by the supervision (e.g. constant or intermittent) of a health care worker (e.g. a doctor, a registered nurse, a nurse practitioner, a physician's assistant, an orderly, or a hospice worker).

[0078] A “single chain Fv” or “scFv”, as used herein, refers to a binding protein in which the variable domains of the heavy chain and of the light chain of a traditional two chain antibody are joined to form one chain. Typically, a linker peptide is inserted between the two chains to allow for proper folding and creation of an active binding site.

[0079] A “cleavage site for a protease,” or “protease cleavage site”, as meant herein, is an amino acid sequence that can be cleaved by a protease, such as, for example, a matrix metalloproteinase or a furin. Examples of such sites include Gly-Pro-Leu-Gly-Ile-Ala-Gly-Gln or Ala-Val-Arg-Trp-Leu-Leu-Thr-Ala, which can be cleaved by metalloproteinases, and Arg-Arg-Arg-Arg-Arg-Arg, which is cleaved by a furin. In therapeutic applications, the protease cleavage site can be cleaved by a protease that is produced by target cells, for example cancer cells or infected cells, or pathogens.

[0080] A “ProTriTAC molecule,” or a “protrispecific molecule,” as used herein, refers to a molecule comprising a dual binding moiety comprising non-CDR loops and a cleavable linker, as described herein; a first domain that is capable of binding a target; and a second domain that is capable of binding a target and further requires that the molecule is in a configuration (also referred to herein as in the “masked state”) where the first or the second domain is masked from binding its target by the dual binding moiety, by specific binding between the dual binding moiety and the first or second domain through the non-CDR loops, by steric occlusion, or a combination of both. In some cases, the first or the second domain is a scFv specific for CD3. Upon cleavage of the cleavable linker, the ProTriTAC molecule is separated from the dual binding moiety. It is possible for the dual binding moiety of the ProTriTAC molecule to be further bound to a bulk serum protein, such as albumin, to form a “ProTetraTAC” molecule. The ProTriTAC molecule, in some example, comprises a masked state and an active state.

[0081] “TriTAC,” as used herein refers to a trispecific binding protein that is not conditionally activated.

[0082] As used herein, “elimination half-time” is used in its ordinary sense, as is described in Goodman and Gillman's The Pharmaceutical Basis of Therapeutics 21-25 (Alfred Goodman Gilman, Louis S. Goodman, and Alfred Gilman, eds., 6th ed. 1980). Briefly, the term is meant to encompass a quantitative measure of the time course of drug elimination. The elimination of most drugs is exponential (i.e., follows first-order kinetics), since drug concentrations usually do not approach those required for saturation of the elimination process. The rate of an exponential process may be expressed by its rate constant, k, which expresses the fractional change per unit of time, or by its half-time, t₁₁₂ the time required for 50% completion of the process. The units of these two constants are time⁻¹ and time, respectively. A first-order rate constant and the half-time of the reaction are simply related (k×t_{1/2}=0.693) and may be interchanged accordingly. Since first-order elimination kinetics dictates that a constant fraction of drug is lost per unit time, a plot of the log of drug concentration versus time is linear at all times following the initial distribution phase (i.e. after drug absorption and distribution are complete). The half-time for drug elimination can be accurately determined from such a graph.

[0083] As used herein, “non-CDR loops” within immunoglobulin (Ig) molecules are regions of a polypeptide other than the complementarity determining regions (CDRs) of an antibody. These regions may be derived from an antibody or an antibody fragment. These regions may also be synthetically or artificially derived, such as through mutagenesis or polypeptide synthesis.

[0084] In an Ig, Ig-like, or beta-sandwich scaffold that has 9 beta-strands (e.g., a VH, a VL, a camelid VHH, a sdAb), the non-CDR loops can refer to the AB, CC′, C″D, EF loops or loops connecting beta-strands proximal to the C-terminus. In an Ig, Ig-like, or beta-sandwich scaffold that has 7 beta-strands (e.g., a CH, a CL, an adnectin, a Fn-III), the non-CDR loops can refer to the AB, CD, and EF loops or loops connecting beta-strands proximal the C-terminus. In other Ig-like or beta-sandwich scaffolds, the non-CDR loops are the loops connecting beta-strands proximal to the C-terminus or topologically equivalent residues using the framework established in the Halaby 1999 publication (Prot Eng Des Sel 12:563-571).

[0085] In a non-beta-sandwich scaffold (e.g., a DARPin, an affimer, an affibody), the “non-CDR loops” refer to an area that is (1) amenable for sequence randomization to allow engineered specificities to a second antigen, and (2) distal to the primary specificity determining region(s) typically used on the scaffold to allow simultaneous engagement of the scaffold to both antigens without steric interference. For this purpose, the primary specificity determining region(s) can be defined using the framework established in the Skrlec 2015 publication (Trends in Biotechnol, 33:408-418). An excerpt of the framework is listed below.

| Scaffold | Primary specificity determining region(s) |
|---|---|
| Affibody | 13 residues in two helices |
| Affimer | 12-36 residues |
| Anticalin | Four loops (up to 24 aa) |
| Avimer | 11 residues |
| Centyrin | 13 residues |
| DARPin | 7 residues in each n-repeat, or |
| | 8 residues in each n-repeat |
| Fynomer | 6 residues in the RT- and n-Src-loop |
| Kunitz domain | 1-2 loops |

[0086] “Target antigen binding domain”, as used herein, refers to a region which targets a specific antigen. A target antigen binding domain comprises, for example an sdAb, an scFv, a variable heavy chain antibody (VHH), a variable heavy (VH) or a variable light domain (VL), a full length antibody, or any other peptide that has a binding affinity towards a specific antigen.

[0087] The term “non-immunoglobulin binding molecules,” as used herein, include but is not limited to examples such as a growth factor, a hormone, a signaling protein, an inflammatory mediator, ligand, a receptor, or a fragment thereof, a native hormone or a variant thereof being able to bind to its natural receptor; a nucleic acid or polynucleotide sequence being able to bind to complementary sequence or a soluble cell surface or intracellular nucleic acid/polynucleotide binding proteins, a carbohydrate binding moiety being able to bind to other carbohydrate binding moieties, cell surface or intracellular proteins, a low molecular weight compound (drug) that binds to a soluble or cell surface or intracellular target protein. The non-immunoglobulin binding molecules, in some cases, include coagulation factors, plasma proteins, fusion proteins, and imaging agents. The non-immunoglobulin binding molecules do not include a cytokine.

[0088] A “cytokine,” as meant herein, refers to intercellular signaling molecules, and active fragments and portions thereof, which are involved in the regulation of mammalian somatic cells. A number of families of cytokines, for example, interleukins, interferons, and transforming growth factors are included.

### Dual Binding Moiety Comprising Cleavable Linker

[0089] An embodiment of the disclosure provides a dual binding moiety that is capable of masking a domain from binding to its target. In some cases, the masking is through a building between the dual binding moiety and the domain via a masking moiety (also referred to herein as a “masking sequence”) present within the dual binding moiety. In some cases, the dual binding moiety is capable of interacting with a domain and the interaction between the dual binding moiety and the domain is a specific binding, such as a specific intermolecular interaction, or via steric occlusion. In some embodiments, through its interaction with the domain, the dual binding moiety masks the domain from binding to its target. In some examples, the domain is a target antigen binding domain. Provided herein, in one embodiment, is a dual binding moiety that is capable of masking a target antigen binding domain from binding its target. The dual binding moiety, in some cases, is further capable of binding to a bulk-serum protein, such as a half-life extending protein, e.g., albumin. Thus, in some embodiments, the dual binding moiety is able to mask the domain from binding its target as well as is able to extend the half-life of the domain through its binding to a bulk serum protein. The dual binding moiety, in certain instances, comprises a cleavable linker attached to it. The cleavable linker, for example, comprises a protease cleavage site or a pH dependent cleavage site. The cleavable linker, in certain instances, is cleaved only in a protease rich environment, such as a tumor micro-environment. The dual binding moiety, in certain instances, is able to keep a domain, such as a target antigen binding domain, in an inert state, by masking the domain from binding its target until the dual binding moiety is in a cellular environment suitable for cleavage of the linker comprising a cleavage site, such as a protease cleavage site. In some cases, the cellular environment suitable for cleavage of the linker is a protease rich environment, such as a tumor microenvironment.

[0090] In some embodiments, the dual binding moiety is capable of interacting with another molecule, such as a non-immunoglobulin molecule, such as therapeutic agent, a small protein, an imaging agent, or a diagnostic agent, whereby the other molecule is kept in an inert state as long as the dual binding moiety is in interaction with it. In certain examples, the other molecule is masked by the dual binding moiety from interacting with its targets or binding partners, wherein the masking is through the interaction between the dual binding moiety and the other molecule by specific binding or by steric occlusion.

[0091] The dual binding moiety, in some embodiments, acts as a safety-switch for the domain or other molecule which is masked by the moiety. Such a safety switch provides several advantages, some examples including (i) expanding the therapeutic window of the domain, such as a target antigen binding domain, (ii) reducing target-mediated drug disposition by maintaining the domain, such as a target antigen binding domain, or a therapeutic agent, in an inert state when it is in systemic circulation, (iii) reducing the concentration of undesirable activated proteins in systemic circulation, thereby minimizing the spread of chemistry, manufacturing, and controls related impurities, e.g., pre-activated drug product, endogenous viruses, host-cell proteins, DNA, leachables, anti-foam, antibiotics, toxins, solvents, heavy metals; (iv) reducing the concentration of undesirable activated proteins in systemic circulation, thereby minimizing the spread of product related impurities, aggregates, breakdown products, product variants due to: oxidation, deamidation, denaturation, loss of C-term Lys in MAbs; (v) preventing aberrant activation of the target antigen binding domain in circulation; (vi) reducing the toxicities associated with the leakage of activated species from diseased tissue or other pathophysiological conditions, e.g., tumors, autoimmune diseases, inflammations, viral infections, tissue remodeling events (such as myocardial infarction, skin wound healing), or external injury (such as X-ray, CT scan, UV exposure); and (vii) reducing non-specific binding of the domain, such as a target antigen binding domain. Furthermore, after breaking of the safety switch, the domain, such as a target antigen binding domain is separated from the safety switch which provided extended half-life, and thus is readily cleared from circulation.

[0092] In addition, the dual binding moiety as described herein, in some cases, is used to generate a “biobetter” version of a biologic. Generally, preparing a biobetter form of a molecule, e.g., an antibody or an antigen binding fragment thereof, involves taking the originator molecule and making specific alterations in it to improve its parameters and thereby make it a more efficacious, less frequently dosed, better targeted, and/or a better tolerated drug. Thus, in some embodiments, the dual binding moiety, which is capable of masking a domain, such as a target antigen binding domain from binding its target, extending the half-life of the domain by binding to a half-life extending protein, such as albumin, and unmasking the domain by separating from it upon cleavage of the cleavable linker, for example, in a tumor microenvironment, gives the target antigen binding domain a significantly longer serum half-life and reduces the likelihood of its undesirable activation in circulation, thereby producing a “biobetter” version of it.

[0093] The dual binding moiety described herein comprises at least one non-CDR loop. In some embodiments, a non-CDR loop provides a binding site for binding of the moiety to a target antigen binding domain. In some embodiments, the dual binding moiety masks the target antigen binding domain from binding to its target, e.g., via steric occlusion, via specific intermolecular interactions, or a combination of steric occlusion and specific intermolecular interactions. Specific intermolecular interactions include, in some cases, Van der Waal interactions, electrostatic interactions, hydrogen bonds (H-bonds). In some cases, masking via an interaction that is a combination of steric occlusion and specific intermolecular interactions, creates an additive or a synergistic effect. T cell engagers transiently tether T cells to tumor cells and mediate T cell-directed tumor killing. T cell engagers, such as blinatumomab (BLINCYTO®), have demonstrated clinical activity in several hematological malignancies. Adoption of T cell engagers in solid tumors is limited by the scarcity of tumor antigens with sufficient differential expression between tumor and normal tissue. T cell engagers that are preferentially active in the tumor microenvironment may enable the safe targeting of more solid tumor antigens. In some cases, the dual binding moieties disclosed herein, are part of T cell engagers that are preferentially active in the tumor microenvironment.

[0094] In some embodiments, the dual binding moiety combines both steric masking (for example, via binding to a bulky serum albumin) and specific masking (for example, via non-CDR loops binding to the CDRs of an anti-CD3 scFv domain). In some cases, modifying non-CDR loops within the dual binding moiety does not affect albumin binding. The protease cleavable linker, in some cases, enables activation of a prodrug molecule comprising the dual binding moiety, in a single proteolytic event, thereby allowing more efficient conversion of the prodrug molecule in tumor microenvironment. Further, tumor-associated proteolytic activation, in some cases, reveals active T cell engager (such as a ProTriTAC molecule comprising a dual binding moiety as described herein, a CD3 binding domain, and an albumin binding domain) with minimal off-tumor activity after activation. The present disclosure, in some embodiments, provides a half-life extended T cell engager format (ProTriTAC) comprising a dual binding moiety as described herein, which in some cases represents a new and improved approach to engineer conditionally active T cell engagers.

[0095] FIG. 2B provides a schematic for an exemplary ProTriTAC molecule comprising a dual binding moiety as described herein (the αalbumin sdAb) and a gel showing the ProTriTAC before and after activation by cleaving of the protease cleavable linker, and FIG. 2A shows a possible mode of action of the same. FIG. 13 shows the schematic structure of an exemplary trispecific molecule (also referred to herein as ProTriTAC or activatable ProTriTAC) containing a dual binding moiety as described herein. The exemplary trispecific molecule contains an anti-albumin domain comprising tethered to a cleavable linker and a masking domain; an anti-CD3 binding domain; and an anti-target domain (such as, a domain specific for a tumor antigen). In some cases, non-CDR loops in the anti-albumin domain is capable of binding and masking the anti-target domain. In some cases, non-CDR loops in the anti-albumin domain is capable of binding and masking the anti-CD3 domain. The anti-albumin domain, in some embodiments, comprises a CDR loop specific for binding albumin.

[0096] In some embodiments, the dual binding moiety is part of a cleavable conditionally active chimeric antigen receptor (CAR), a T-cell receptor fusion protein, a T-cell receptor. A T-cell receptor generally comprises multiple subunits, including alpha, beta, delta, gamma, epsilon, and zeta subunits. The conditionally active T-cell receptor of the present disclosure comprises a dual binding moiety. In some embodiments, the dual binding moiety is attached to a T-cell receptor subunit including, but not limited to, the alpha subunit, beta subunit, or a combination thereof. As used herein, a “T-cell receptor (TCR) fusion protein” or “TFP” includes a recombinant polypeptide derived from the various polypeptides comprising the TCR that is generally capable of i) binding to a surface antigen on target cells and ii) interacting with other polypeptide components of the intact TCR complex, typically when co-located in or on the surface of a T-cell. A CAR generally comprises multiple domains, including a target antigen binding domain, a transmembrane domain, and an intracellular signaling domain. The conditionally active CAR of the present disclosure comprises multiple domains, including a dual binding moiety, a target antigen binding domain, a transmembrane domain, and an intracellular signaling domain. In some embodiments, the intracellular signaling domain is a signaling domain of a protein including, but not limited to, ZAP70, CD3 zeta, and 4-1BB.

[0097] FIG. 36 shows a schematic representation of a portion of an example cleavable conditionally active receptor of the present disclosure. The conditionally active receptor comprises a target antigen binding domain (aTarget1), a cleavable linker, and a dual binding moiety (aTarget2). The target antigen binding domain has specificity for a first target, while the dual binding moiety has specificity for a second target. The dual binding moiety also has a modified non-CDR loop, which inhibits binding of the target antigen binding domain to its target. Once cleaved at the cleavable linker, the dual binding moiety can be released, enabling binding of the target antigen binding domain.

[0098] FIG. 37 shows a schematic representation of the activation of an example conditionally active receptor of the present disclosure. Inactive receptor (Inactive ProCAR) comprises a target antigen binding domain (Anti-Tumor Target sdAb or scFv) connected to a dual binding moiety (Anti-Target 2 sdAb) via a linker comprising a protease cleavage site. The dual binding moiety comprises a masking peptide, inserted into one or more non-CDR loops, such that the dual binding moiety binds to and inhibits the target antigen binding domain. In some embodiments, the dual binding moiety has specificity for a given target, as described further elsewhere herein. The receptor also comprises a transmembrane domain and an intracellular signaling domain. The receptor is provided in a T-cell (CAR-T). Upon exposure to a tumor environment, the protease cleavage site is cleaved by tumor-associated proteases, thereby activating the receptor, generating the active receptor which does not comprise the dual binding moiety. The receptor now comprises an active antigen-binding domain. As the receptor is internalized by the cell, new receptors are generated which comprise the dual binding moiety and are inactive.

[0099] The conditionally active receptor, the conditionally active T-cell receptor fusion protein, in some cases, comprise at least one of: a transmembrane domain, and a hinge domain, a stimulatory domain, a costimulatory domain, or any combinations thereof.

[0100] In some embodiments, the transmembrane domain is interposed between the target antigen binding domain and the intracellular domain. In some embodiments, the transmembrane domain is interposed between the target antigen binding domain and the costimulatory domain. Any transmembrane (TM) domain that provides for insertion of a polypeptide into the cell membrane of a eukaryotic (e.g., mammalian) cell is suitable for use. As one non-limiting example, the TM sequence IYIWAPLAGTCGVLLLSLVITLYC (SEQ ID NO: 971) can be used. Additional non-limiting examples of suitable TM sequences include: a) CD8 beta derived: GLLVAGVLVLLVSLGVAIHLCC (SEQ ID NO: 9721); b) CD4 derived: ALIVLGGVAGLLLFIGLGIFFCVRC (SEQ ID NO: 973); c) CD3 zeta derived: LCYLLDGILFIYGVILTALFLRV (SEQ ID NO: 974); d) CD28 derived: WVLVVVGGVLACYSLLVTVAFIIFWV (SEQ ID NO: 975); e) CD134 (OX40) derived: AAILGLGLVLGLLGPLAILLALYLL (SEQ ID NO: 976); and f) CD7 derived: ALPAALAVISFLLGLGLGVACVLA (SEQ ID NO: 977). In some embodiments, the transmembrane domain comprises a transmembrane domain of a protein including, but not limited to, a TCR alpha chain, a TCR beta chain, a TCR zeta chain, a CD3 epsilon TCR subunit, a CD3 gamma TCR subunit, a CD3 delta TCR subunit, CD45, CD4, CDS, CD8, CD9, CD16, CD22, CD33, CD28, CD37, CD64, CD80, CD86, CD134, CD137, CD154, functional fragments thereof, or amino acid sequences thereof having at least one, two, or three modifications but not more than 20, 10, or 5 modifications thereto.

[0101] In some embodiments, the T-cell receptor intracellular domain comprises a stimulatory domain. The stimulatory domain may be from T-cell receptor subunit, including but not limited to the beta subunit, alpha subunit, delta subunit, gamma subunit, epsilon subunit, or a combination thereof. In some embodiments, the stimulatory domain comprises an immunoreceptor tyrosine-based activation motif (ITAM) or portion thereof including, but not limited to, CD3 zeta TCR subunit, CD3 epsilon TCR subunit, CD3 gamma TCR subunit, CD3 delta TCR subunit, TCR zeta chain, Fc epsilon receptor 1 chain, Fc epsilon receptor 2 chain, Fc gamma receptor 1 chain, Fc gamma receptor 2a chain, Fc gamma receptor 2b 1 chain, Fc gamma receptor 2b2 chain, Fc gamma receptor 3a chain, Fc gamma receptor 3b chain, Fc beta receptor 1 chain, TYROBP (DAP12), CDS, CD16a, CD16b, CD22, CD23, CD32, CD64, CD79a, CD79b, CD89, CD278, CD66d, functional fragments thereof, and amino acid sequences thereof having at least one, two, or three modifications but not more than 20, 10, or 5 modifications thereto.

[0102] In some embodiments, the conditionally active TFP further comprises a costimulatory domain. In some embodiments, the costimulatory domain is a functional signaling domain of a protein including, but not limited to, OX40, CD2, CD27, CD28, CDS, ICAM-1, LFA-1 (CD11a/CD18), ICOS (CD278), and 4-1BB (CD137), and amino acid sequences thereof having at least one, two, or three modifications but not more than 20, 10, or 5 modifications thereto.

[0103] In some cases, the conditionally active chimeric antigen receptors, T-cell receptor fusion proteins, and T-cell receptors of the present disclosure comprise a hinge region (also referred to herein as a “spacer”), where the hinge region is interposed between the target antigen binding domain and the transmembrane domain. In some cases, the hinge region is an immunoglobulin heavy chain hinge region. In some cases, the hinge region is a hinge region polypeptide derived from a receptor (e.g., a CD8-derived hinge region).

[0104] The hinge region can have a length of from about 4 amino acids to about 50 amino acids (aa), e.g., from about 4 aa to about 10 aa, from about 10 aa to about 15 aa, from about 15 aa to about 20 aa, from about 20 aa to about 25 aa, from about 25 aa to about 30 aa, from about 30 aa to about 40 aa, or from about 40 aa to about 50 aa.

[0105] Suitable spacers can be readily selected and can be of any of a number of suitable lengths, such as from 1 amino acid (e.g., Gly) to 20 amino acids, from 2 amino acids to 15 amino acids, from 3 amino acids to 12 amino acids, including 4 amino acids to 10 amino acids, 5 amino acids to 9 amino acids, 6 amino acids to 8 amino acids, or 7 amino acids to 8 amino acids, and can be 1, 2, 3, 4, 5, 6, or 7 amino acids.

[0106] Exemplary spacers include glycine polymers (G)n, glycine-serine polymers (including, for example, (GS)n, (GSGGS)n and (GGGS)n, where n is an integer of at least one), glycine-alanine polymers, alanine-serine polymers, and other flexible linkers known in the art. Glycine and glycine-serine polymers can be used; both Gly and Ser are relatively unstructured, and therefore can serve as a neutral tether between components. Glycine polymers can be used; glycine accesses significantly more phi-psi space than even alanine, and is much less restricted than residues with longer side chains (see Scheraga, Rev. Computational Chem. 11173-142 (1992)). Exemplary spacers comprise amino acid sequences including, but not limited to, GGSG, GGSGG, GSGSG, GSGGG, GGGSG, GSSSG, and the like.

[0107] Immunoglobulin hinge region amino acid sequences are known in the art; see, e.g., Tan et al. (1990) Proc. Natl. Acad. Sci. USA 87: 162; and Huck et al. (1986) Nucl. Acids Res. 14: 1779. As non-limiting examples, an immunoglobulin hinge region can include one of the following amino acid sequences: DKTHT; CPPC; CPEPKSCDTPPPCPR (SEQ ID NO: 978); (see, e.g., Glaser et al. (2005) J. Biol. Chem. 280:41494); ELKTPLGDTTHT (SEQ ID NO: 979); KSCDKTHTCP (SEQ ID NO: 980); KCCVDCP (SEQ ID NO: 981); KYGPPCP (SEQ ID NO: 982); EPKSCDKTHTCPPCP (SEQ ID NO: 983); human IgG1 hinge); ERKCCVECPPCP (SEQ ID NO: 984); human IgG2 hinge); ELKTPLGDTTHTCPRCP (SEQ ID NO: 985); human IgG3 hinge); SPNMVPHAHHAQ (SEQ ID NO: 986); human IgG4 hinge); and the like.

[0108] In some embodiments, the hinge region comprises an amino acid sequence of a human IgG1, IgG2, IgG3, or IgG4, hinge region. The hinge region can include one or more amino acid substitutions and/or insertions and/or deletions compared to a wild-type (naturally-occurring) hinge region. For example, His229 of human IgG1 hinge can be substituted with Tyr, so that the hinge region comprises the sequence EPKSCDKTYTCPPCP (SEQ ID NO: 986); see, e.g., Yan et al. (2012) J. Biol. Chem. 287. 5891.

[0109] In some embodiments, the hinge region comprises an amino acid sequence derived from human CD8; e.g., the hinge region comprises the amino acid sequence: TTTPAPRPPTPAPTIASQPLSLRPEACRPAAGGAVHTRGLDFACD (SEQ ID NO: 987), or a variant thereof.

[0110] In some embodiments, the dual binding moiety further comprises complementarity determining regions (CDRs). In some instances, the dual binding moiety is a domain derived from an immunoglobulin binding molecule (Ig molecule). The Ig molecule, in some instances, is of any class or subclass, such as IgG1, IgG2, IgG3, IgG4, IgA, IgE, IgM. A polypeptide chain of an Ig molecule folds into a series of parallel beta strands linked by loops. In the variable region, three of the loops constitute the “complementarity determining regions” (CDRs) which determine the antigen binding specificity of the molecule. An IgG molecule comprises at least two heavy (H) chains and two light (L) chains inter-connected by disulfide bonds, or an antigen binding fragment thereof. Each heavy chain is comprised of a heavy chain variable region (abbreviated herein as VH) and a heavy chain constant region. The heavy chain constant region is comprised of three domains, CH1, CH2 and CH3. Each light chain is comprised of a light chain variable region (abbreviated herein as VL) and a light chain constant region. The light chain constant region is comprised of one domain, CL. The VH and VL regions can be further subdivided into regions of hypervariability, termed complementarity determining regions (CDRs) with are hypervariable in sequence and/or involved in antigen recognition and/or usually form structurally defined loops, interspersed with regions that are more conserved, termed framework regions (FR). Each VH and VL is composed of three CDRs and four FRs, arranged from amino-terminus to carboxy-terminus in the following order: FR1, CDR1, FR2, CDR2, FR3, CDR3, FR4. In some embodiments of this disclosure, at least some or all of the amino acid sequences of FR1, FR2, FR3, and FR4 are part of the “non-CDR loop” of the dual binding moiety described herein. As shown in FIG. 1, a variable domain of an immunoglobulin binding molecule has several beta strands that are arranged in two sheets. The variable domains of both light and heavy immunoglobulin chains contain three hypervariable loops, or complementarity-determining regions (CDRs). The three CDRs of a V domain (CDR1, CDR2, CDR3) cluster at one end of the beta barrel. The CDRs are the loops that connect beta strands B-C, C-C″, and F-G of the immunoglobulin fold, whereas the bottom loops that connect beta strands AB, CC′, C″D and EF of the immunoglobulin fold, and the top loop that connects the D-E strands of the immunoglobulin fold are the non-CDR loops. In some embodiments of this disclosure, at least some amino acid residues of a constant domain, CH1, CH2, or CH3, are part of the “non-CDR loop” of the binding moieties described herein. Non-CDR loops comprise, in some embodiments, one or more of AB, CD, EF, and DE loops of a C1-set domain of an Ig or an Ig-like molecule; AB, CC′, EF, FG, BC, and EC′ loops of a C2-set domain of an Ig or an Ig-like molecule; DE, BD, GF, A(A1A2)B, and EF loops of I(Intermediate)-set domain of an Ig or Ig-like molecule.

[0111] Within the variable domain, the CDRs are believed to be responsible for antigen recognition and binding, while the FR residues are considered a scaffold for the CDRs. However, in certain cases, some of the FR residues play an important role in antigen recognition and binding. Framework region residues that affect Ag binding are divided into two categories. The first are FR residues that contact the antigen, thus are part of the binding-site, and some of these residues are close in sequence to the CDRs. Other residues are those that are far from the CDRs in sequence, but are in close proximity to it in the 3-D structure of the molecule, e.g., a loop in heavy chain.

[0112] In some embodiments, the non-CDR loop within the dual binding moiety is modified to generate an antigen binding site specific for a target antigen binding domain. This site is also referred to herein as the masking sequence or the masking moiety. It is contemplated that various techniques can be used for modifying the non-CDR loop, e.g., site-directed mutagenesis, random mutagenesis, insertion of at least one amino acid that is foreign to the non-CDR loop amino acid sequence, amino acid substitution. An antigen peptide is inserted into a non-CDR loop, in some examples. In some examples, an antigenic peptide is substituted for the non-CDR loop. In some embodiments, one or more non-CDR loop is extended, for example by adding glycine residues, in addition to other modifications, such as, for generating a binding site, grafting an epitope, or combination thereof. The extension of one or more non-CDR loop within the dual binding moiety, in some instances, allows the dual binding moiety to sterically occlude a domain, such as a target antigen binding domain, from binding its target. The modification, to generate an antigen binding site, is in some cases in only one non-CDR loop. In other instances, more than one non-CDR loop are modified. For instance, the modification is in any one of the non-CDR loops shown in FIG. 1, i.e., AB, CC′, C″D, EF, and DE. In some cases, the modification is in the DE loop. In some cases, the modification is in the CC′ loop. In other cases the modifications are in all four of AB, CC′, C″ D, EF loops. In certain examples, the dual binding moiety is capable of an interaction with a domain, such as a target antigen binding domain via one or more of the AB, CC′, C″ D, and EF loops and is capable of binding to a bulk-serum protein, such as albumin, via one or more of the BC, C-C″, and FG loops. In certain examples, the dual binding moiety is capable of binding to a domain, such as a target antigen binding domain via specific intermolecular interactions involving at least one of the AB, CC′, C″ D, and EF loops and is capable of binding to a bulk-serum protein, such as albumin, via one or more of the BC, C′C″, and FG loop. In certain examples, the dual binding moiety is capable of binding to a domain, such as a target antigen binding domain via specific intermolecular interactions involving at least one of the AB, CC′, C″ D, and EF loops, as well as via steric occlusion, and is further capable of binding to a bulk-serum protein, such as albumin, via its BC, C′C″, and FG loop. In certain examples, the dual binding moiety is capable of binding to a bulk serum protein, such as albumin, via one or more of the AB, CC′, C″ D, and EF loops and is capable of binding to the target antigen binding domain via one or more of the BC, C′C″, and FG loops. In certain examples, the dual binding moiety is capable of binding to a bulk serum protein, such as albumin, via specific intermolecular interactions involving one or more of the AB, CC′, C″ D, and EF loops and is capable of binding to the target antigen binding domain via specific intermolecular interactions involving one or more of the BC, C′C″, and FG loops. In certain examples, the dual binding moiety is capable of binding to a bulk serum protein, such as albumin, via specific intermolecular interactions involving one or more of the AB, CC′, C″ D, and EF loops and is capable of binding to the target antigen binding domain via specific intermolecular interactions involving one or more of the BC, C′C″, and FG loops, as well as via steric occlusion.

[0113] In some embodiments, an epitope is grafted into the non-CDR loop within the dual binding moiety. For instance, in some cases, a human CD3ε sequence is grafted into the non-CDR loop, such as into the CC′ loop. The dual binding moiety, in such embodiment, is capable of binding to a half-life extending protein via the CDRs and an anti-CD3 domain via the non-CDR loops, e.g., the CC′ loop. The presence of the CD3 epitope in the non-CDR loop allows competitive binding between the CD3 epitope within the dual binding moiety and an anti-CD3 domain, in some embodiments, thereby masking the anti-CD3 domain from binding to its target. The anti-CD3 domain, in some cases, is part of a scFv.

TABLE 1
Exemplary sequences for the masking moiety are provided in SEQ ID Nos. 50,
259-301, and 795.

| MaskID | Sequence | Alt. Names | SEQ ID No. |
|---|---|---|---|
| MASK001 | APGKG | WT | SEQ ID No. 795 |
| MASK002 | GGQDGNEEMGGG | CC12 (masking moiety | SEQ ID No. 259 |
| | | comprising a CD3 | |
| | | sequence grafted) | |
| MASK004 | GGQDGNEEGG | CC10 (masking moiety | SEQ ID No. 260 |
| | | comprising a CD3 | |
| | | sequence grafted) | |
| MASK006 | GGGGQDGNEEMGGGGG | CC16 (masking moiety | SEQ ID No. 261 |
| | | comprising a CD3 | |
| | | sequence grafted) | |
| MASK007 | APFGSEM | | SEQ ID No. 262 |
| MASK008 | AWNGPYE | | SEQ ID No. 263 |
| MASK009 | AQDNGDTKTG | | SEQ ID No. 264 |
| MASK010 | AEAKETQG | | SEQ ID No. 265 |
| MASK011 | ATRREQVEG | | SEQ ID No. 266 |
| MASK012 | AQAPSQP | | SEQ ID No. 267 |
| MASK013 | ATRSRTRNDG | | SEQ ID No. 268 |
| MASK014 | ADVDAPDGLG | | SEQ ID No. 269 |
| MASK015 | AADISDPGG | | SEQ ID No. 270 |
| MASK016 | ALSVDPSG | | SEQ ID No. 271 |
| MASK017 | ARLSVDPG | | SEQ ID No. 272 |
| MASK018 | AVEAADRG | | SEQ ID No. 273 |
| MASK020 | GGPDGNEEMGGG | CC12-Q1P | SEQ ID No. 274 |
| MASK021 | GGFDGNEEMGGG | CC12-Q1F | SEQ ID No. 275 |
| MASK022 | GGGDGNEEMGGG | CC12-Q1G | SEQ ID No. 276 |
| MASK023 | GGEMDGEGQNGG | CC12-scramble | SEQ ID No. 277 |
| MASK024 | GGGGGPDGNEEPGG | | SEQ ID No. 278 |
| MASK025 | GGGGSLDGNEEPGG | | SEQ ID No. 279 |
| MASK026 | GGGGALDGNEEPGG | | SEQ ID No. 280 |
| MASK027 | GGGGGLDGNEEPGG | | SEQ ID No. 281 |
| MASK028 | GGGALDGNEEPGG | | SEQ ID No. 282 |
| MASK029 | GGGGGPDGNEEPGGG | | SEQ ID No. 283 |
| MASK030 | GGSGALDGNEEPGG | | SEQ ID No. 284 |
| MASK031 | GGSGSLDGNEEPGG | | SEQ ID No. 285 |
| MASK038 | GGSGGPDGNEEPGG | | SEQ ID No. 286 |
| MASK039 | GGVRDGPDGNEEPGG | | SEQ ID No. 287 |
| MASK040 | GGSGGPDGNEEPGGGG | | SEQ ID No. 288 |
| MASK041 | GGGRGPDGNEEPGG | | SEQ ID No. 289 |
| MASK042 | GGSGGLDGNEEPGG | | SEQ ID No. 290 |
| MASK043 | GGGVGPDGNEEPGG | | SEQ ID No. 291 |
| MASK044 | GGGEGPDGNEEPGG | | SEQ ID No. 292 |
| MASK046 | GGGVALDGNEEPGG | | SEQ ID No. 293 |
| MASK047 | GGGRALDGNEEPGG | | SEQ ID No. 294 |
| MASK048 | GGYAGLDGNEEPGG | | SEQ ID No. 295 |
| MASK049 | GGAGGPDGNEEPGG | | SEQ ID No. 296 |
| MASK051 | GGRGGPDGNEEPGG | | SEQ ID No. 297 |
| MASK052 | GGGGPDGNEEPGGGG | | SEQ ID No. 298 |
| MASK053 | GGGEALDGNEEPGG | | SEQ ID No. 299 |
| MASK054 | GGDASLDGNEEPGG | | SEQ ID No. 300 |
| MASK055 | GGRDAPDGNEEGG | | SEQ ID No. 301 |

TABLE 2
Exemplary sequences for the dual binding moieties
comprising a cleavable linker are provided in SEQ
ID Nos. 796-800.
Sequence

SEQ ID No. 796
EVQLVESGGGLVQPGNSLRLSCAASGFTFSKFGMSWVRQGGGGGLDGNEE
PGGLEWVSSISGSGRDTLYADSVKGRFTISRDNAKTTLYLQMNSLRPEDT
AVYYCTIGGSLSVSSQGTLVTVSSGGGGKPLGLQARVVGGGGT
SEQ ID No. 797
EVQLVESGGGLVQPGNSLRLSCAASGFTFSKFGMSWVRQGGGGGLDGNEE
PGGLEWVSSISGSGRDTLYADSVKGRFTISRDNAKTTLYLQMNSLRPEDT
AVYYCTIGGSLSVSSQGTLVTVSSGGGGPQASTGRSGGGGGGT
SEQ ID No. 798
EVQLVESGGGLVQPGNSLRLSCAASGFTFSKFGMSWVRQGGGGGLDGNEE
PGGLEWVSSISGSGRDTLYADSVKGRFTISRDNAKTTLYLQMNSLRPEDT
AVYYCTIGGSLSVSSQGTLVTVSSGGGGPQGSTGRAAGGGGGT
SEQ ID No. 799
EVQLVESGGGLVQPGNSLRLSCAASGFTFSKFGMSWVRQGGGGGLDGNEE
PGGLEWVSSISGSGRDTLYADSVKGRFTISRDNAKTTLYLQMNSLRPEDT
AVYYCTIGGSLSVSSQGTLVTVSSGGGGPPASSGRAGGGGGT
SEQ ID No. 800
EVQLVESGGGLVQPGNSLRLSCAASGFTFSKFGMSWVRQGGGGGLDGNEE
PGGLEWVSSISGSGRDTLYADSVKGRFTISRDNAKTTLYLCIMNSLRPED
TAVYYCTIGGSLSVSSQGTLVTVSSGGGGPIPVQGRAHGGGGT

[0114] The dual binding moiety, in certain embodiments, is any kind of polypeptide. In some embodiments, the dual binding moiety is a natural peptide, a synthetic peptide, or a fibronectin scaffold. In some embodiments, the dual binding moiety is an engineered bulk serum protein. In some embodiments, the dual binding moiety comprises one or more polypeptides. In some cases, the dual binding moiety comprises two or more polypeptides that are linked together by a non-cleavable linker. In certain examples, the non-CDR loop is in one of the two polypeptides and the CDR loop is on the other.

[0115] The bulk serum protein comprises, for example, albumin, fibrinogen, or a globulin. In some embodiments, the dual binding moiety is an engineered scaffold. The engineered scaffold comprises, for example, sdAb, a scFv, a Fab, a VHH, a fibronectin type III domain, immunoglobulin-like scaffold, Darin, cystine knot peptide, lipocalin, three-helix bundle scaffold, protein G-related albumin-binding module, or a DNA or RNA aptamer scaffold.

[0116] In some embodiments, the dual binding moiety is capable of interaction with at least one target antigen. In some embodiments, the non-CDR loops provide a binding site for the at least one target antigen binding domain, such that the moiety is capable of masking the target antigen binding domain from binding to its target. Target antigens, in some cases, are expressed on the surface of a diseased cell or tissue, for example a tumor or a cancer cell. Target antigens include but are not limited to EpCAM (exemplary protein sequence comprises UniProtkB ID No. P16422), EGFR (exemplary protein sequence comprises UniProtkB ID No. P00533), HER-2 (exemplary protein sequence comprises UniProtkB ID No. P04626), HER-3 (exemplary protein sequence comprises UniProtkB ID No. P21860), c-Met (exemplary protein sequence comprises UniProtkB ID No. P08581), FoIR (exemplary protein sequence comprises UniProtkB ID No. P15238), PSMA (exemplary protein sequence comprises UniProtkB ID No. Q04609), CD38 (exemplary protein sequence comprises UniProtkB ID No. P28907), BCMA (exemplary protein sequence comprises UniProtkB ID No. Q02223), and CEA (exemplary protein sequence comprises UniProtkB ID No. P06731, 5T4 (exemplary protein sequence comprises UniProtkB ID No. Q13641), AFP (exemplary protein sequence comprises UniProtkB ID No. P02771), B7-H3 (exemplary protein sequence comprises UniProtkB ID No. Q5ZPR3), CDH-6 (exemplary protein sequence comprises UniProtkB ID No. P97326), CAIX (exemplary protein sequence comprises UniProtkB ID No. Q16790), CD117 (exemplary protein sequence comprises UniProtkB ID No. P10721), CD123 (exemplary protein sequence comprises UniProtkB ID No. P26951), CD138 (exemplary protein sequence comprises UniProtkB ID No. P18827), CD166 (exemplary protein sequence comprises UniProtkB ID No. Q13740), CD19 (exemplary protein sequence comprises UniProtkB ID No. P15931), CD20 (exemplary protein sequence comprises UniProtkB ID No. P11836), CD205 (exemplary protein sequence comprises UniProtkB ID No. 060449), CD22 (exemplary protein sequence comprises UniProtkB ID No. P20273), CD30 (exemplary protein sequence comprises UniProtkB ID No. P28908), CD33 (exemplary protein sequence comprises UniProtkB ID No. P20138), CD352 (exemplary protein sequence comprises UniProtkB ID No. Q96DU3), CD37 (exemplary protein sequence comprises UniProtkB ID No. P11049), CD44 (exemplary protein sequence comprises UniProtkB ID No. P16070), CD52 (exemplary protein sequence comprises UniProtkB ID No. P31358), CD56 (exemplary protein sequence comprises UniProtkB ID No. P13591), CD70 (exemplary protein sequence comprises UniProtkB ID No. P32970), CD71 (exemplary protein sequence comprises UniProtkB ID No. P02786), CD74 (exemplary protein sequence comprises UniProtkB ID No. P04233), CD79b (exemplary protein sequence comprises UniProtkB ID No. P40259), DLL3 (exemplary protein sequence comprises UniProtkB ID No. Q9NYJ7), EphA2 (exemplary protein sequence comprises UniProtkB ID No. P29317), FAP (exemplary protein sequence comprises UniProtkB ID No. Q12884), FGFR2 (exemplary protein sequence comprises UniProtkB ID No. P21802), FGFR3 (exemplary protein sequence comprises UniProtkB ID No. P22607), GPC3 (exemplary protein sequence comprises UniProtkB ID No. P51654), gpA33 (exemplary protein sequence comprises UniProtkB ID No. Q99795), FLT-3 (exemplary protein sequence comprises UniProtkB ID No. P36888), gpNMB (exemplary protein sequence comprises UniProtkB ID No. Q14956), HPV-16 E6 (exemplary protein sequence comprises UniProtkB ID No. P03126), HPV-16 E7 (exemplary protein sequence comprises UniProtkB ID No. P03129), ITGA2 (exemplary protein sequence comprises UniProtkB ID No. P17301), ITGA3 (exemplary protein sequence comprises UniProtkB ID No. P26006), SLC39A6 (exemplary protein sequence comprises UniProtkB ID No. Q13433), MAGE (exemplary protein sequence comprises UniProtkB ID No. Q9HC15), mesothelin (exemplary protein sequence comprises UniProtkB ID No. Q13421), Muc1 (exemplary protein sequence comprises UniProtkB ID No. P15941), Muc16 (exemplary protein sequence comprises UniProtkB ID No. Q8WX17), NaPi2b (exemplary protein sequence comprises UniProtkB ID No. 095436), Nectin-4 (exemplary protein sequence comprises UniProtkB ID No. Q96918), CDH-3 (exemplary protein sequence comprises UniProtkB ID No. Q8WX17), CDH-17 (exemplary protein sequence comprises UniProtkB ID No. E5RJT3), EPHB2 (exemplary protein sequence comprises UniProtkB ID No. P29323), ITGAV (exemplary protein sequence comprises UniProtkB ID No. P06756), ITGB6 (exemplary protein sequence comprises UniProtkB ID No. P18564), NY-ESO-1 (exemplary protein sequence comprises UniProtkB ID No. P78358), PRLR (exemplary protein sequence comprises UniProtkB ID No. P16471), PSCA (exemplary protein sequence comprises UniProtkB ID No. 043653), PTK7 (exemplary protein sequence comprises UniProtkB ID No. Q13308), ROR1 (exemplary protein sequence comprises UniProtkB ID No. Q01973), SLC44A4 (exemplary protein sequence comprises UniProtkB ID No. Q53GD3), SLITRK5 (exemplary protein sequence comprises UniProtkB ID No. Q81W52), SLITRK6 (exemplary protein sequence comprises UniProtkB ID No. Q9HY7), STEAP1 (exemplary protein sequence comprises UniProtkB ID No. Q9UHE8), TIM1 (exemplary protein sequence comprises UniProtkB ID No. Q96D42), Trop2 (exemplary protein sequence comprises UniProtkB ID No. P09758), or WT1 (exemplary protein sequence comprises UniProtkB ID No. P19544), or any combinations thereof. In some embodiments, the target antigen is an immune checkpoint protein. Examples of immune checkpoint proteins include but are not limited to CD27 (exemplary protein sequence comprises UniProtkB ID No. P26842), CD137 (exemplary protein sequence comprises UniProtkB ID No. Q07011), 2B4 (exemplary protein sequence comprises UniProtkB ID No. Q9bZW8), TIGIT (exemplary protein sequence comprises UniProtkB ID No. Q495A1), CD155 (exemplary protein sequence comprises UniProtkB ID No. P15151), ICOS (exemplary protein sequence comprises UniProtkB ID No. Q9Y6W8), HVEM (exemplary protein sequence comprises UniProtkB ID No. 043557), CD40L (exemplary protein sequence comprises UniProtkB ID No. P29965), LIGHT (exemplary protein sequence comprises UniProtkB ID No. 043557), OX40 (exemplary protein sequence comprises UniProtkB ID No.), DNAM-1 (exemplary protein sequence comprises UniProtkB ID No. Q15762), PD-L1 (exemplary protein sequence comprises UniProtkB ID No. Q9ZQ7), PD1 (exemplary protein sequence comprises UniProtkB ID No. Q15116), PD-L2 (exemplary protein sequence comprises UniProtkB ID No. Q9BQ51), CTLA-4 (exemplary protein sequence comprises UniProtkB ID No. P16410), CD8 (exemplary protein sequence comprises UniProtkB ID No. P10966, P01732), CD40 (exemplary protein sequence comprises UniProtkB ID No. P25942), CEACAM1 (exemplary protein sequence comprises UniProtkB ID No. P13688), CD48 (exemplary protein sequence comprises UniProtkB ID No. P09326), CD70 (exemplary protein sequence comprises UniProtkB ID No. P32970), AA2AR (exemplary protein sequence comprises UniProtkB ID No. P29274), CD39 (exemplary protein sequence comprises UniProtkB ID No. P49961), CD73 (exemplary protein sequence comprises UniProtkB ID No. P21589), B7-H3 (exemplary protein sequence comprises UniProtkB ID No. Q5ZPR3), B7-H4 (exemplary protein sequence comprises UniProtkB ID No. Q7Z7D3), BTLA (exemplary protein sequence comprises UniProtkB ID No. Q76A9), IDO1 (exemplary protein sequence comprises UniProtkB ID No. P14902), IDO2 (exemplary protein sequence comprises UniProtkB ID No. Q6ZQW0), TDO (exemplary protein sequence comprises UniProtkB ID No. P48755), KIR (exemplary protein sequence comprises UniProtkB ID No. Q99706), LAG-3 (exemplary protein sequence comprises UniProtkB ID No. P18627), TIM-3 (exemplary protein sequence comprises UniProtkB ID No. Q8TDQ0), or VISTA (exemplary protein sequence comprises UniProtkB ID No. Q9D659). In some embodiments, a target antigen is a cell surface molecule such as a protein, lipid or polysaccharide. In some embodiments, a target antigen is a on a tumor cell, virally infected cell, bacterially infected cell, damaged red blood cell, arterial plaque cell, inflammed or fibrotic tissue cell.

[0117] In some embodiments, the dual binding moiety comprises a binding site for a bulk serum protein. In some embodiments, the CDRs provide the binding site for the bulk serum protein. The bulk serum protein is, in some examples, globulin, albumin, transferrin, IgG1, IgG2, IgG4, IgG3, IgA monomer, Factor XIII, Fibrinogen, IgE, or pentameric IgM. In some embodiments, the dual binding moiety comprises a binding site for an immunoglobulin light chain. In some embodiments, the CDRs provide a binding site for the immunoglobulin light chain. The immunoglobulin light chain may be, for example, an Igκ free light chain or an Igλ free light chain.

[0118] In one embodiment, the dual binding moiety comprises any type of binding domain, including but not limited to, domains from a monoclonal antibody, a polyclonal antibody, a recombinant antibody, a human antibody, a humanized antibody. In some embodiments, the dual binding moiety is a single chain variable fragment (scFv), a soluble TCR fragment, a single-domain antibody such as a heavy chain variable domain (VH), a light chain variable domain (VL) and a variable domain (VHH) of camelid derived nanobody. In other embodiments, the dual binding moiety is a non-Ig binding domain, i.e., antibody mimetic, such as anticalins, affilins, affibody molecules, affimers, affitins, alphabodies, avimers, DARPins, fynomers, kunitz domain peptides, and monobodies.

[0119] Further examples of target antigen binding domains that the dual binding moiety is capable of interacting with include, but are not limited to, a T cell engager, a bispecific T cell engager, a dual-affinity re-targeting antibody, a variable heavy domain (VH), a variable light domain (VL), a soluble TCR fragment comprising a Valpha and Vbeta domain, an scFv comprising a VH and a VL domain, a single domain antibody (sdAb), or a variable domain of camelid derived nanobody (VHH), a non-Ig binding domain, i.e., antibody mimetic, such as anticalins, affilins, affibody molecules, affimers, affitins, alphabodies, avimers, DARPins, fynomers, kunitz domain peptides, and monobodies, a ligand or peptide. In some embodiments, the first or the second target antigen binding domain is a VHH domain. In some embodiments, the dual binding moiety is capable of binding a target antigen binding domain, wherein the target antigen binding domain is an sdAb. In some instances, the dual binding moiety is capable of binding aCD3 binding domain.

[0120] It is contemplated herein that the dual binding moiety described herein comprises at least one cleavable linker. In one aspect, the cleavable linker comprises a polypeptide having a sequence recognized and cleaved in a sequence-specific manner. The cleavage, in certain examples, is enzymatic, based on pH sensitivity of the cleavable linker, or by chemical degradation. A protease cleavable linker, in some cases, is recognized in a sequence-specific manner by a matrix metalloprotease (MMP), for example a MMP9. In some cases, the protease cleavable linker is recognized by a MMP9 comprises a polypeptide having an amino acid sequence PR(S/T)(L/I)(S/T). In some cases, the protease cleavable linker is recognized by a MMP9 and comprises a polypeptide having an amino acid sequence LEATA. In some cases, the protease cleavable linker is recognized in a sequence-specific manner by MMP11 In some cases, the protease cleavable linker recognized by MMP11 comprises a polypeptide having an amino acid sequence GGAANLVRGG (SEQ IN NO: 3). In some cases, the protease cleavable linker is recognized by a protease disclosed in Table 3. In some cases, the protease cleavable linker is recognized by a protease disclosed in Table 3 comprises a polypeptide having an amino acid sequence selected from a sequence disclosed in Table 3 (SEQ ID NOS: 1-42, 53, and 58-62).

[0121] Proteases are proteins that cleave proteins, in some cases, in a sequence-specific manner. Proteases include but are not limited to serine proteases, cysteine proteases, aspartate proteases, threonine proteases, glutamic acid proteases, metalloproteases, asparagine peptide lyases, serum proteases, cathepsins, Cathepsin B, Cathepsin C, Cathepsin D, Cathepsin E, Cathepsin K, Cathepsin L, kallikreins, hK1, hK10, hK15, plasmin, collagenase, Type IV collagenase, stromelysin, Factor Xa, chymotrypsin-like protease, trypsin-like protease, elastase-like protease, subtilisin-like protease, actinidain, bromelain, calpain, caspases, caspase-3, Mir1-CP, papain, HIV-1 protease, HSV protease, CMV protease, chymosin, renin, pepsin, matriptase, legumain, plasmepsin, nepenthesin, metalloexopeptidases, metalloendopeptidases, matrix metalloproteases (MMP), MMP1, MMP2, MMP3, MMP7, MMP8, MMP9, MMP13, MMP11, MMP14, urokinase plasminogen activator (uPA), enterokinase, prostate-specific antigen (PSA, hK3), interleukin-1β converting enzyme, thrombin, FAP (FAP-α), dipeptidyl peptidase, type II transmembrane serine proteases (TTSP), neutrophil serine protease, cathepsin G, proteinase 3, neutrophil serine protease 4, mast cell chymase, mast cell tryptases

TABLE 3
Exemplary Proteases and Protease Recognition
Sequences

| | | SEQ |
|---|---|---|
| | Cleavage Domain | ID |
| Protease | Sequence | NO: |
| MMP7 | KRALGLPG | 1 |
| MMP7 | (DE)₈RPLALWRS(DR)₈ | 2 |
| MMP9 | PR(S/T)(L/I)(S/T) | 3 |
| MMP9 | LEATA | 4 |
| MMP11 | GGAANLVRGG | 5 |
| MMP14 | SGRIGFLRTA | 6 |
| MMP | PLGLAG | 7 |
| MMP | PLGLAX | 8 |
| MMP | PLGC(me)AG | 9 |
| MMP | ESPAYYTA | 10 |
| MMP | RLQLKL | 11 |
| MMP | RLQLKAC | 12 |
| MMP2, MMP9, MMP14 | EP(Cit)G(Hof)YL | 13 |
| Urokinase plasminogen | SGRSA | 14 |
| activator (uPA) | | |
| Urokinase plasminogen | DAFK | 15 |
| activator (uPA) | | |
| Urokinase plasminogen | GGGRR | 16 |
| activator (uPA) | | |
| Lysosomal Enzyme | GFLG | 17 |
| Lysosomal Enzyme | ALAL | 18 |
| Lysosomal Enzyme | FK | 19 |
| Cathepsin B | NLL | 20 |
| Cathepsin D | PIC(Et)FF | 21 |
| Cathepsin K | GGPRGLPG | 22 |
| Prostate Specific Antigen | HSSKLQ | 23 |
| Prostate Specific Antigen | HSSKLQL | 24 |
| Prostate Specific Antigen | HSSKLQEDA | 25 |
| Herpes Simplex Virus | LVLASSSFGY | 26 |
| Protease | | |
| HIVProtease | GVSQNYPIVG | 27 |
| CMVProtease | GVVQASCRLA | 28 |
| Thrombin | F(Pip)RS | 29 |
| Thrombin | DPRSFL | 30 |
| Thrombin | PPRSFL | 31 |
| Caspase-3 | DEVD | 32 |
| Caspase-3 | DEVDP | 33 |
| Caspase-3 | KGSGDVEG | 34 |
| Interleukin 1β converting | GWEHDG | 35 |
| enzyme | | |
| Enterokinase | EDDDDKA | 36 |
| FAP | KQEQNPGST | 37 |
| Kallikrein 2 | GKAFRR | 38 |
| Plasmin | DAFK | 39 |
| Plasmin | DVLK | 40 |
| Plasmin | DAFK | 41 |
| TOP | ALLLALL | 42 |
| MMP9 + matriptase | KPLGLQARVV | 58 |
| MMP9 + matriptase + uPA | PQASTGRSGG | 59 |
| MMP9 + matriptase + uPA | PQGSTGRAAG | 60 |
| Matriptase + uPA | PPASSGRAGG | 61 |
| MMP9 + matriptase | PIPVQGRAH | 62 |
| MMP9 + matriptase + uPA | PQGSTARSAG | 988 |

[0122] Proteases are known to be secreted by some diseased cells and tissues, for example tumor or cancer cells, creating a microenvironment that is rich in proteases or a protease-rich microenvironment. In some case, the blood of a subject is rich in proteases. In some cases, cells surrounding the tumor secrete proteases into the tumor microenvironment. Cells surrounding the tumor secreting proteases include but are not limited to the tumor stromal cells, myofibroblasts, blood cells, mast cells, B cells, NK cells, regulatory T cells, macrophages, cytotoxic T lymphocytes, dendritic cells, mesenchymal stem cells, polymorphonuclear cells, and other cells. In some cases, proteases are present in the blood of a subject, for example proteases that target amino acid sequences found in microbial peptides. This feature allows for targeted therapeutics such as antigen binding proteins to have additional specificity because T cells will not be bound by the antigen binding protein except in the protease rich microenvironment of the targeted cells or tissue.

[0123] In some embodiments of this disclosure the dual binding moieties described herein comprise at least one non-cleavable linker. The non-cleavable linker comprises, in some examples, a sequence as set forth in SEQ ID No. 51, SEQ ID No. 302, SEQ ID No. 303, SEQ ID No. 304, or SEQ ID No. 305.

TABLE 4
Exemplary non-cleavable linker sequences

| Non-cleavable | | |
|---|---|---|
| Linker ID | Sequence | SEQ ID No. |
| L002 | SGGGGSGGVV | SEQ ID No. 302 |
| L016 | SGGGGSGGGGSGGGGS | SEQ ID No. 303 |
| L017 | SGGGGSGGGGSGGGGGS | SEQ ID No. 304 |
| L046 | SGGGGSGGGS | SEQ ID No. 305 |

[0124] The dual binding moiety comprising the cleavable linker thus masks the binding of a first or a second target antigen binding domain to their respective targets. In some embodiments, the dual binding moiety is bound to a first target antigen binding domain, which is further bound to a second target antigen binding domain, in the following order: dual binding moiety (M): cleavable linker (L): first target antigen binding domain (T1): second antigen binding domain (T2), to form a ProTriTAC molecule. In other examples, the domains are organized in any one of the following orders: M:L:T2:T1; T2:T1:L:M, T1:T2:L:M. The dual binding moiety is, in some cases, further bound to a half-life extending protein, such as albumin or any other of its targets as described below. In some instances, the dual binding moiety is albumin or comprises a binding site for albumin. In some instances the dual binding moiety comprises a binding site for IgE. In some embodiments, the dual binding moiety comprises a binding site for Igκ free light chain. In some embodiments, the dual binding moiety comprises an albumin binding domain (anti-Alb), the first target antigen binding domain (T1) comprises a CD3 binding domain (e.g., an anti-CD3 scFv), and a ProTriTAC molecule has the following orientation: anti-Alb: anti-CD3: T2. In some embodiments, the dual binding moiety comprises an albumin binding domain (anti-Alb), the second target antigen binding domain (T2) comprises a CD3 binding domain (e.g., an anti-CD3 scFv), and a ProTriTAC molecule has the following orientation: anti-Alb:T1: anti-CD3. The T1 domain, in certain examples, is a tumor antigen binding domain, such as, but not limited to, an anti-EGFR domain, an anti-MSLN domain, an anti-BCMA domain, an anti-EpCAM domain, an anti-PSMA domain, or an anti-DLL3 domain.

[0125] ProTriTAC molecules (also referred to herein as protrispecific molecules) comprising a dual binding moiety as described herein are, in some embodiments, T cell engager prodrugs designed to be conditionally active in a tumor microenvironment. In some cases, this enables targeting of a wider selection of tumor antigens (e.g., solid tumor antigens). The ProTriTAC molecules, in some examples, combine the desirable attributes of several prodrug approaches, including, but not limited to: combination of steric and specific masking, wherein the steric masking is, in some cases, is through albumin that is recognized by an anti-albumin domain in a ProTriTAC molecule, and the specific masking, in some cases, is through specific intermolecular interactions between an anti-albumin domain (in some examples) and a target antigen binding domain of the ProTriTAC molecule (such as, an anti-CD3 scFv domain, in some examples); additional safety imparted by half-life differential of prodrug versus an active drug, derived by activation of the conditionally activated ProTriTAC molecule; ability to plug-and-play with different tumor target binders.

### Binding Moiety Variants

[0126] As used herein, the term “binding moiety variants” refers to variants and derivatives of the dual binding moiety described herein, comprising non-CDR loops that are capable of binding to domain, such as a target antigen binding domain and CDRs that are capable of binding to a half-life extending protein, such as albumin. In certain embodiments, amino acid sequence variants of the dual binding moiety described herein are contemplated. For example, in certain embodiments amino acid sequence variants of the dual binding moiety described herein are contemplated to improve the binding affinity alone or along with other biological properties of the antibodies. Exemplary method for preparing such amino acid variants include, but are not limited to, introducing appropriate modifications into the nucleotide sequence encoding the antibody, or by peptide synthesis. Such modifications include, for example, deletions from, and/or insertions into and/or substitutions of residues within the amino acid sequences of the dual binding moiety.

[0127] Any combination of deletion, insertion, and substitution are made, in various embodiments, to the dual binding moiety, to arrive at the final construct, provided that the final construct possesses a desired characteristic, e.g., capability of binding a target antigen binding domain and a half-life extending protein. In certain embodiments, binding protein variants having one or more amino acid substitutions are provided. Sites of interest for substitution mutagenesis include the CDRs, the non-CDR loops, and the framework regions. Amino acid substitutions are introduced, in some cases, into the non-CDR loops of a dual binding moiety and the products screened for a desired activity, e.g., retained/improved antigen binding, decreased immunogenicity, or improved antibody-dependent cell mediated cytotoxicity (ADCC) or complement dependent cytotoxicity (CDC). Both conservative and non-conservative amino acid substitutions are contemplated for preparing the dual binding moiety variants. Amino acid substitutions may be conservative or semi-conservative. For example, the amino acids glycine, alanine, valine, leucine and isoleucine can often be substituted for one another (amino acids having aliphatic side chains). Of these possible substitutions, typically glycine and alanine are used to substitute for one another since they have relatively short side chains and valine, leucine and isoleucine are used to substitute for one another since they have larger aliphatic side chains which are hydrophobic. Other amino acids which may often be substituted for one another include but are not limited to: phenylalanine, tyrosine and tryptophan (amino acids having aromatic side chains); lysine, arginine and histidine (amino acids having basic side chains); aspartate and glutamate (amino acids having acidic side chains); asparagine and glutamine (amino acids having amide side chains); and cysteine and methionine (amino acids having sulphur-containing side chains). In some embodiments, the conditionally active target-binding proteins are isolated by screening combinatorial libraries, for example, by generating phage display libraries and screening such libraries for antibodies possessing the desired binding characteristics towards a target antigen, such as a tumor antigen expressed on a cell surface.

[0128] In another example of a substitution to create a variant dual binding moiety, one or more hypervariable region residues of a parent molecule, such as a domain of an antibody are substituted. In general, variants are then selected based on improvements in desired properties compared to a parent antibody, for example, increased affinity, reduced affinity, reduced immunogenicity, increased pH dependence of binding. For example, an affinity matured variant dual binding moiety is generated, in some cases, e.g., using phage display-based affinity maturation techniques.

[0129] In some cases, substitutions are made in hypervariable regions (HVR) of an immunoglobulin binding molecule to generate variants and then selected based on binding affinity to a target antigen binding domain, to a half-life extending domain, or both, i.e., by affinity maturation. In some embodiments of affinity maturation, diversity is introduced into the variable genes chosen for maturation by any of a variety of methods (e.g., error-prone PCR, chain shuffling, or oligonucleotide-directed mutagenesis). A secondary library is then created. The library is then screened to identify any antibody variants with the desired affinity. Another method to introduce diversity involves HVR-directed approaches, in which several HVR residues (e.g., 4-6 residues at a time) are randomized. HVR residues involved in antigen binding may be specifically identified, e.g., using alanine scanning mutagenesis or modeling. Substitutions can be in one, two, three, four, or more sites within a parent antibody sequence.

[0130] In some embodiments, a dual binding moiety, as described herein is “humanized”, or “camelized,” i.e., by replacing one or more amino acid residues in the amino acid sequence of said naturally occurring immunoglobulin binding molecule (and in particular in the framework sequences) by one or more of the amino acid residues that occur at the corresponding position(s) in an equivalent binding moiety from a conventional 4-chain antibody from a human being, or a camelid species.

### Affinity Maturation

[0131] In designing dual binding moieties for therapeutic applications, it is desirable to create proteins that, for example, modulate a functional activity of a target, and/or improved binding proteins such as binding proteins with higher specificity and/or affinity and/or and binding proteins that are more bioavailable, or stable or soluble in particular cellular or tissue environments.

[0132] The dual binding moieties described in the present disclosure exhibit improved the binding affinities towards domain target antigen binding domain. In some embodiments, the dual binding moiety of the present disclosure is affinity matured to increase its binding affinity to a target antigen binding domain, using any known technique for affinity-maturation (e.g., mutagenesis, chain shuffling, CDR amino acid substitution). Amino acid substitutions may be conservative or semi-conservative. For example, the amino acids glycine, alanine, valine, leucine and isoleucine can often be substituted for one another (amino acids having aliphatic side chains). Of these possible substitutions, typically glycine and alanine are used to substitute for one another since they have relatively short side chains and valine, leucine and isoleucine are used to substitute for one another since they have larger aliphatic side chains which are hydrophobic. Other amino acids which may often be substituted for one another include but are not limited to: phenylalanine, tyrosine and tryptophan (amino acids having aromatic side chains); lysine, arginine and histidine (amino acids having basic side chains); aspartate and glutamate (amino acids having acidic side chains); asparagine and glutamine (amino acids having amide side chains); and cysteine and methionine (amino acids having sulphur-containing side chains). In some embodiments, the dual binding moiety is isolated by screening combinatorial libraries, for example, by generating phage display libraries and screening such libraries for binding moieties possessing the desired binding characteristics towards a target antigen binding domain, such as a domain that binds a tumor antigen expressed on a cell surface.

### Dual Binding Moiety Modifications

[0133] The dual binding moieties described herein encompass derivatives or analogs in which (i) an amino acid is substituted with an amino acid residue that is not one encoded by the genetic code, (ii) the mature polypeptide is fused with another compound such as polyethylene glycol, or (iii) additional amino acids are fused to the protein, such as a leader or secretory sequence or a sequence to block an immunogenic domain and/or for purification of the protein.

[0134] Typical modifications include, but are not limited to, acetylation, acylation, ADP-ribosylation, amidation, covalent attachment of flavin, covalent attachment of a heme moiety, covalent attachment of a nucleotide or nucleotide derivative, covalent attachment of a lipid or lipid derivative, covalent attachment of phosphatidylinositol, cross-linking, cyclization, disulfide bond formation, demethylation, formation of covalent crosslinks, formation of cystine, formation of pyroglutamate, formylation, gamma carboxylation, glycosylation, GPI anchor formation, hydroxylation, iodination, methylation, myristylation, oxidation, proteolytic processing, phosphorylation, prenylation, racemization, selenoylation, sulfation, transfer-RNA mediated addition of amino acids to proteins such as arginylation, and ubiquitination.

[0135] Modifications are made anywhere in the dual binding moieties described herein, including the peptide backbone, the amino acid side-chains, and the amino or carboxyl termini. Certain common peptide modifications that are useful for modification of the conditionally active binding proteins include glycosylation, lipid attachment, sulfation, gamma-carboxylation of glutamic acid residues, hydroxylation, blockage of the amino or carboxyl group in a polypeptide, or both, by a covalent modification, and ADP-ribosylation.

[0136] In some embodiments, the dual binding moieties of the disclosure are capable of being conjugated with drugs to form antibody-drug conjugates (ADCs). In general, ADCs are used in oncology applications, where the use of antibody-drug conjugates for the local delivery of cytotoxic or cytostatic agents allows for the targeted delivery of the drug moiety to tumors, which can allow higher efficacy, lower toxicity, etc.

### Polynucleotides Encoding the Dual Binding Moiety

[0137] Also provided, in some embodiments, are polynucleotide molecules encoding the dual binding moiety as described herein. In some embodiments, the polynucleotide molecules are provided as a DNA construct. In other embodiments, the polynucleotide molecules are provided as a messenger RNA transcript.

[0138] The polynucleotide molecules are constructed by methods such as by combining the genes encoding the dual binding moiety comprising a single domain or in some cases comprising two or more polypeptides separated by peptide linkers or, in other embodiments, two or more polypeptides directly linked by a peptide bond, into a single genetic construct operably linked to a suitable promoter, and optionally a suitable transcription terminator, and expressing it in bacteria or other appropriate expression system such as, for example CHO cells. Depending on the vector system and host utilized, any number of suitable transcription and translation elements, including constitutive and conditionally active promoters, may be used. The promoter is selected such that it drives the expression of the polynucleotide in the respective host cell.

[0139] In some embodiments, the polynucleotide is inserted into a vector, preferably an expression vector, which represents a further embodiment. This recombinant vector can be constructed according to known methods. Vectors of particular interest include plasmids, phagemids, phage derivatives, virii (e.g., retroviruses, adenoviruses, adeno-associated viruses, herpes viruses, lentiviruses, and the like), and cosmids.

[0140] A variety of expression vector/host systems may be utilized to contain and express the polynucleotide encoding the polypeptide of the described conditionally active binding protein. Examples of expression vectors for expression in E. coli are pSKK (Le Gall et al., J Immunol Methods. (2004) 285(1):111-27) or pcDNA5 (Invitrogen) for expression in mammalian cells.

[0141] Thus, the dual binding moiety or the conditionally active binding proteins comprising the dual binding moiety as described herein, in some embodiments, are produced by introducing a vector encoding the moiety or the protein as described above into a host cell and culturing said host cell under conditions whereby the moiety or the protein domains are expressed.

### Pharmaceutical Compositions

[0142] Also provided, in some embodiments, are pharmaceutical compositions comprising a therapeutically effective amount a dual binding moiety of the present disclosure, and at least one pharmaceutically acceptable carrier. The term “pharmaceutically acceptable carrier” includes, but is not limited to, any carrier that does not interfere with the effectiveness of the biological activity of the ingredients and that is not toxic to the patient to whom it is administered. Examples of suitable pharmaceutical carriers are well known in the art and include phosphate buffered saline solutions, water, emulsions, such as oil/water emulsions, various types of wetting agents, sterile solutions etc. Such carriers can be formulated by conventional methods and can be administered to the subject at a suitable dose. Preferably, the compositions are sterile. These compositions may also contain adjuvants such as preservative, emulsifying agents and dispersing agents. Prevention of the action of microorganisms may be ensured by the inclusion of various antibacterial and antifungal agents.

[0143] The dual binding moieties described herein are contemplated for use as a medicament. Administration is effected by different ways, e.g., by intravenous, intraperitoneal, subcutaneous, intramuscular, topical or intradermal administration. In some embodiments, the route of administration depends on the kind of therapy and the kind of compound contained in the pharmaceutical composition. The dosage regimen will be determined by the attending physician and other clinical factors. Dosages for any one patient depends on many factors, including the patient's size, body surface area, age, sex, the particular compound to be administered, time and route of administration, the kind of therapy, general health and other drugs being administered concurrently. An “effective dose” refers to amounts of the active ingredient that are sufficient to affect the course and the severity of the disease, leading to the reduction or remission of such pathology and may be determined using known methods.

### Methods of Treatment

[0144] Also provided herein, in some embodiments, are methods and uses for stimulating the immune system of an individual in need thereof comprising administration of a dual binding moiety as described herein. In some instances, administration induces and/or sustains cytotoxicity towards a cell expressing a target antigen. In some instances, the cell expressing a target antigen is a cancer or tumor cell, a virally infected cell, a bacterially infected cell, an autoreactive T or B cell, damaged red blood cells, arterial plaques, or fibrotic tissue. In some embodiments, the target antigen is an immune checkpoint protein.

[0145] Also provided herein are methods and uses for a treatment of a disease, disorder or condition associated with a target antigen comprising administering to an individual in need thereof a dual binding protein as described herein, which is capable of binding a half-life extending protein and further capable of interacting with a domain, such as a target antigen binding domain and masking the same from binding its target. Diseases, disorders or conditions associated with a target antigen include, but are not limited to, viral infection, bacterial infection, auto-immune disease, transplant rejection, atherosclerosis, or fibrosis. In other embodiments, the disease, disorder or condition associated with a target antigen is a proliferative disease, a tumorous disease, an inflammatory disease, an immunological disorder, an auto-immune disease, an infectious disease, a viral disease, an allergic reaction, a parasitic reaction, a graft-versus-host disease or a host-versus-graft disease. In one embodiment, the disease, disorder or condition associated with a target antigen is cancer. In one instance, the cancer is a hematological cancer. In another instance, the cancer is a melanoma. In a further instance, the cancer is non-small cell lung cancer. In yet further instance, the cancer is breast cancer.

[0146] As used herein, in some embodiments, “treatment” or “treating” or “treated” refers to therapeutic treatment wherein the object is to slow (lessen) an undesired physiological condition, disorder or disease, or to obtain beneficial or desired clinical results. For the purposes described herein, beneficial or desired clinical results include, but are not limited to, alleviation of symptoms; diminishment of the extent of the condition, disorder or disease; stabilization (i.e., not worsening) of the state of the condition, disorder or disease; delay in onset or slowing of the progression of the condition, disorder or disease; amelioration of the condition, disorder or disease state; and remission (whether partial or total), whether detectable or undetectable, or enhancement or improvement of the condition, disorder or disease. Treatment includes eliciting a clinically significant response without excessive levels of side effects. Treatment also includes prolonging survival as compared to expected survival if not receiving treatment. In other embodiments, “treatment” or “treating” or “treated” refers to prophylactic measures, wherein the object is to delay onset of or reduce severity of an undesired physiological condition, disorder or disease, such as, for example is a person who is predisposed to a disease (e.g., an individual who carries a genetic marker for a disease such as breast cancer).

[0147] In some embodiments of the methods described herein, the dual binding protein as described herein, which is capable of binding a half-life extending protein and further capable of interacting with a domain, such as a target antigen binding domain and masking the same from binding its target is administered in combination with an agent for treatment of the particular disease, disorder or condition. Agents include but are not limited to, therapies involving antibodies, small molecules (e.g., chemotherapeutics), hormones (steroidal, peptide, and the like), radiotherapies (γ-rays, X-rays, and/or the directed delivery of radioisotopes, microwaves, UV radiation and the like), gene therapies (e.g., antisense, retroviral therapy and the like) and other immunotherapies. In some embodiments, the conditionally active binding protein described herein is administered in combination with anti-diarrheal agents, anti-emetic agents, analgesics, opioids and/or non-steroidal anti-inflammatory agents. In some embodiments, the dual binding protein as described herein, which is capable of binding a half-life extending protein and further capable of interacting with a domain, such as a target antigen binding domain and masking the same from binding its target is administered before, during, or after surgery.

### EXAMPLES

[0148] The examples below further illustrate the described embodiments without limiting the scope of the disclosure.

### Example 1: Construction of an Exemplary Dual Binding Moiety which Binds to Albumin and a Target Antigen Binding Domain Whose Target is EGFR

[0149] The sequence of an engineered protein scaffold comprising CDR loops capable of binding albumin and non-CDR loops is obtained. Overlapping PCR is used to introduce random mutations in the non-CDR loop regions, thereby generating a library. The resultant sequences are cloned into a phage display vector, thereby generating a phage display library. Escherichia coli cells are transformed with the library and used to construct a phage display library. ELISA is performed using an immobilized target antigen binding domain with specificity for EGFR. A clone with high specificity for EGFR is selected. Affinity maturation is performed by re-randomizing residues in the non-CDR loop regions as before.

[0150] Sequence alignment of non-CDR loop regions of the resultant proteins is performed to determine sequence conservation between proteins with high affinity for the EGFR binding target antigen binding domain. Site directed mutagenesis of one or more amino acids within these regions of sequence conservation is performed to generate additional proteins. Binding of the resultant proteins to an immobilized target antigen binding domain whose target is EGFR is measured in an ELISA. A protein with the highest affinity for the target antigen binding domain is selected.

[0151] The sequence of this dual binding moiety is cloned into a vector comprising a sequence for a cleavable linker, and sequences for a second target antigen binding domain that binds to a second target antigen, e.g., CD3. The resultant vector is expressed in a heterologous expression system to obtain a conditionally active target binding protein that comprises a dual binding moiety comprising a cleavable linker and non-CDR loops which provide a binding site specific for the target antigen binding domain whose target is EGFR, and CDR loops which are specific for albumin.

### Example 2: An Exemplary Dual Binding Moiety which Comprises an Extended Non-CDR Loop into which a Human CD3ε Epitope is Grafted

[0152] The sequence of a dual binding moiety comprising non-CDR loops (AB, EF, C″D, and CC′) is obtained. A portion of the human CD3ε sequence is grafted into the CC′ loop of the non-CDR loops within the dual binding moiety, along with glycine residues to further extend the CC′ loop. The dual binding moiety comprising extended non-CDR loops comprising the CD3ε sequences, as described above, are cloned into a vector further comprising coding sequences for a protease cleavable linker, a scFv containing a CD3 binding domain, and an EGFR binding domain, to express a conditionally activated molecule. The multidomain molecule is subsequently exposed to a tumor associated protease, matriptase, to assay activation of the molecule upon cleavage of the protease cleavable linker, which separates the dual binding moiety comprising the cleavable linker from the rest of the molecule, i.e., the scFv containing the CD3 binding domain and the EGFR binding domain (aEGFR). Activation of the multidomain molecule, containing the extended CC′ non-CDR loop, CD3 binding scFv in a VH-VL or a VL-VH format, upon treatment with matriptase, is observed. A multidomain molecule containing a wild-type CC′ loop in the dual binding moiety is used as a control for the protease activation assay. In addition, a control multidomain molecule that is not in the “pro” form, i.e., a molecule that includes the same domains as the ProTriTAC molecule, except that it has a half-life extension domain, such as albumin, instead of a dual binding moiety, is also treated with matriptase and used as a control. Results indicate that the multidomain molecules are activated upon cleavage, to generate a free albumin binding domain whereas the albumin domain did not separate from the control multidomain molecule. Thus, the multidomain molecules containing a dual binding moiety of this disclosure is able to readily dissociate from the half-life extending domain upon cleavage in a tumor microenvironment, unlike the control multidomain molecules, and thereby are amenable to rapid clearance from the systemic circulation upon activation.

[0153] Further studies are carried out to assay the binding of the dual binding moiety containing the human CD3ε to CD3. It was observed that the activated forms of multidomain molecule that contained the dual binding moiety containing the human CD3ε are about 20 times potent in binding CD3 than their activated forms which do not contain the dual binding moiety.

[0154] Cell killing potential of a multidomain molecule that contains a dual binding moiety as described herein are also assayed in a study where a cancer cell line is treated with the multidomain molecule or its activated form.

### Example 3: A Conditionally Active Binding Protein of this Disclosure Exhibits Reduced Specificity Toward Cell Line which Overexpresses EGFR but is Protease Deficient

[0155] Cells overexpressing EGFR and exhibiting low expression of a matrix metalloprotease are separately incubated with an exemplary conditionally active binding protein according to the present disclosure and a non-conditionally active control binding protein. Cells expressing normal levels of EGFR and proteases are also incubated with a conditionally active binding protein according to the present disclosure and a non-conditionally active control binding protein. Both proteins comprise a target antigen binding domain with specificity toward PSMA.

[0156] Results indicate that in the absence of protease secretion, the conditionally active binding protein of the present disclosure interacts with the protease expressing cells but does not interact with the EGFR expressed on the surface of the protease deficient cells. In contrast, the non-conditionally active control binding protein lacks the ability to selectively bind the protease expressing cells over the protease deficient ones. Thus, the exemplary conditionally active binding protein receptor of the present disclosure is advantageous, for example, in terms of reducing off-tumor toxicity.

### Example 4: Treatment with an Exemplary Conditionally Active Binding Protein of the Present Disclosure Inhibits In Vivo Tumor Growth

[0157] Murine tumor line CT26 is implanted subcutaneously in BALB/c mice and on day 7 post-implantation the average size of the tumor is measured. Test mice are treated with an exemplary conditionally active binding protein which has a target antigen binding domain specific for CTLA4 and another target antigen binding domain specific for CD3, wherein either the CTLA4 or the CD3 specific domain is bound to a dual binding moiety via its non-CDR loops, the dual binding moiety comprises a cleavable linker, and is bound to albumin. Control mice are treated with binding protein that contains CD3/CTLA4 specific domains but do not contain the dual binding moiety or the cleavable linker, and are not conditionally active. Results show that treatment with the exemplary conditionally active binding protein of the present disclosure inhibits tumor more efficiently than the comparator binding protein which does not contain the moiety with non-CDR loops.

### Example 5: Exemplary Conditionally Active Binding Protein Exhibits Reduced Specificity Toward Cell Line which Overexpresses Antigen but is Protease Deficient

[0158] Cells overexpressing CTLA-4 and exhibiting low expression of a matrix metalloprotease are separately incubated with an exemplary CTLA4 specific conditionally active binding protein of this disclosure, containing a dual binding moiety that binds to a CTLA4 binding domain via its non-CDR loops and albumin via its CDRs; or a control CTLA-4 binding antibody which does not contain the dual binding moiety which binds to a CTLA4 binding domain via its non-CDR loops and to albumin via its CDRs. Cells expressing normal levels of antigens and proteases are also incubated with the exemplary CTLA4 specific conditionally active binding protein, or the control CTLA4 binding antibody.

[0159] Results indicate that in the absence of protease secretion, the conditionally active binding protein of the present disclosure binds the protease expressing cells but does not bind the protease-deficient antigen expressing cells. In contrast, the control antibody lacks the ability to selectively bind the protease expressing cells over the protease deficient ones. Thus, the exemplary conditionally active binding protein of the present disclosure is advantageous, for example, in terms of reducing off-tumor toxicity.

### Example 6: Purification, Pharmacokinetic Analysis, and Potency Assays for Exemplary ProTriTAC Molecules Containing Exemplary Dual Binding Moieties of this Disclosure

[0160] A) Expression, Purification and Stability of Exemplary ProTriTAC Molecules

[0161] Protein Production

[0162] Sequences of exemplary ProTriTAC (also referred to as trispecific) molecules were cloned into mammalian expression vector pcDNA 3.4 (Invitrogen) preceded by a leader sequence and followed by a 6× Histidine Tag. Expi293F cells (Life Technologies A14527) were maintained in suspension in Optimum Growth Flasks (Thomson) between 0.2 to 8×1e6 cells/ml in Expi 293 media. Purified plasmid DNA was transfected into Expi293 cells in accordance with Expi293 Expression System Kit (Life Technologies, A14635) protocols, and maintained for 4-6 days post transfection. Alternatively, sequences of trispecific molecules were cloned into mammalian expression vector pDEF38 (CMC ICOS) transfected into CHO-DG44 dhfr-cells, stable pools generated, and cultured in production media for up to 12 days prior to purification. The amount of the exemplary trispecific proteins in conditioned media was quantitated using an Octet RED 96 instrument with Protein A tips (ForteBio/Pall) using a control trispecific protein for a standard curve. Conditioned media from either host cell was filtered and partially purified by affinity and desalting chromatography. Trispecific proteins were subsequently polished by ion exchange and upon fraction pooling formulated in a neutral buffer containing excipients. Final purity was assessed by SDS-PAGE and analytical SEC using an Acquity BEH SEC 200 1.7u 4.6×150 mm column (Waters Corporation) resolved in an aqueous/organic mobile phase with excipients at neutral pH on a 1290 LC system and peaks integrated with Chemstation CDS software (Agilent). Trispecific proteins purified from CHO host cells were analyzed by running an SDS-PAGE, as shown in FIG. 3.

[0163] Stability Assessment

[0164] Purified trispecific molecules in two formulations were sub-aliquoted into sterile tubes and stressed by five freeze-thaw cycles each comprising greater than 1 hour at −80° C. and room temperature or by incubation at 37° C. for 1 week. Stressed samples were evaluated for concentration and turbidity by UV spectrometry using UV transparent 96 well plates (Corning 3635) with a SpectraMax M2 and SoftMaxPro Software (Molecular Devices), SDS-PAGE, and analytical SEC and compared to the same analysis of control non-stressed samples. An overlay of chromatograms from analytical SEC of control and stressed samples for a single exemplary trispecific ProTriTAC molecule purified from 293 host cells is depicted in FIG. 4.

[0165] B) ProTriTAC Exhibits Potent, Protease-Dependent, Anti-Tumor Activity in a Rodent Tumor Xenograft Model

[0166] An exemplary ProTriTAC molecule (SEQ ID NO: 46) containing an EGFR binding domain as the target binding domain, a CD3 binding domain, and an albumin binding domain comprising a masking moiety (SEQ ID NO: 50) and a cleavable linker (SEQ ID NO: 53), was evaluated for anti-tumor activity in vivo in an HCT116 subcutaneous xenograft tumor admixed with expanded human T cells in immunocompromised NCG mice. A non-cleavable EGFR targeting ProTriTAC (SEQ ID NO: 47) molecule and a GFP targeting ProTriTAC molecule (SEQ ID NO: 49) were also used in the study. Specifically, 5×10⁶ HCT116 cells were admixed with 2.5×10⁶ expanded T cells per mouse on day 0. Dosing of the test molecules (EGFR targeting ProTriTAC, non-cleavable EGFR targeting Pro-TriTAC, and GFP targeting ProTriTAC) were performed starting on the following day with a q.d.×10 (single daily dose for 10 days) schedule via intraperitoneal injection, at a dose of 0.03 mg/kg. Tumor volumes were determined using caliper measurements and calculated using the formula V=(length×width×width)/2, at the indicated times. Results shown in FIG. 5 indicate that following final dose of test molecules, on day 10, tumor growth was arrested in mice administered the activatable EGFR targeting ProTriTAC molecule. Whereas, administering the GFP targeting ProTriTAC molecule was not effective in inhibiting tumor growth and the administration of the EGFR targeting non-cleavable ProTriTAC molecule was not as potent as the activatable ProTriTAC, in arresting tumor growth.

[0167] C) Demonstration of Functional Masking and Stability of ProTriTAC In Vivo in a Three-Week Cynomolgus Monkey Pharmacokinetic Study

[0168] Single doses of an exemplary PSMA targeting ProTriTAC (SEQ ID NO: 43) containing a PSMA binding domain as the target binding domain, a CD3 binding domain, and an albumin binding domain comprising a masking moiety (SEQ ID NO: 50) and a cleavable linker (SEQ ID NO: 53), non-cleavable PSMA targeting ProTriTAC (SEQ ID NO: 44); non-masked/non-cleavable PSMA targeting TriTAC (SEQ ID NO: 52); and active drug mimicking protease-activated PSMA targeting ProTriTAC (SEQ ID NO: 45) were dosed into cynomolgus monkeys at 0.1 mg/kg via intravenous injection. Plasma samples were collected at the time points indicated in FIG. 7 The designs of the above described test molecules are shown in FIG. 6. Concentrations of the various test molecules, as described above, were determined using ligand binding assays with biotinylated recombinant human PSMA (R&D systems) and sulfo-tagged anti-CD3 idiotype antibody cloned 11D3 in a MSD assay (Meso Scale Diagnostic, LLC). Pharmacokinetic parameters were estimated using Phoenix WinNonlin pharmacokinetic software using a non-compartmental approach consistent with the intravenous bolus route of administration.

[0169] To calculate the rate of in vivo conversion of the test molecules (i.e., conversion of PSMA targeting ProTriTAC, non-cleavable PSMA targeting ProTriTAC, non-masked/non-cleavable PSMA targeting ProTriTAC, and active drug mimicking protease-activated PSMA targeting ProTriTAC) the concentration of active drug in circulation was estimated by solving the following system of differential equations where P is the concentration of prodrug, A is the concentration of active drug, kₐ is the rate of prodrug activation in circulation, k_{c,P} is the clearance rate of the prodrug, and k_{c,A} is the clearance rate of the active drug.

$$\frac{d P}{dt} = - {k}_{c , P} P$$

$$\frac{d A}{dt} = {k}_{a} P - {k}_{c , A} A$$

[0170] The clearance rates of the prodrug, active drug, and a non-cleavable prodrug control (k_{c,NCLV}) were determined empirically in cynomolgus monkeys. To estimate the rate of prodrug activation in circulation, it was assumed that the difference between the clearance rate of cleavable prodrug and the non-cleavable prodrug arose solely from non-specific activation in circulation. Therefore, the rate of prodrug conversion to active drug in circulation was estimated by subtracting the clearance rate of the cleavable prodrug from the non-cleavable prodrug.

kₐ=k_{c,NCLV}−k_{c,P}

[0171] The initial concentration of prodrug in circulation was determined empirically and the initial concentration of active drug was assumed to be zero. Further calculations showed that the ProTriTAC comprising the protease cleavable linker was sufficiently stable in circulation, with 50% non-tumor mediated conversion every 194 hours and the t_{1/2} of the molecule was determined, empirically, to be around 211 hours. This indicated that ProTriTAC molecules are sufficiently stable and protected against off-tumor effects. In contrast, the t_{1/2} of the active drug fragment mimicking the activated ProTriTAC molecule was determined, empirically, to be 0.97 hours. Thus, active drug was rapidly cleared from circulation. Results are shown in FIG. 8.

[0172] FIG. 9 shows that because the active drug mimicking the activated ProTriTAC molecule was rapidly cleared from circulation and that the ProTriTAC and the control non-masked non-cleavable ProTriTAC had longer longer half-lives, there is a significant >200-fold differential between the ProTriTAC and the activated ProTriTAC circulating exposure. It was also observed that the masked but non-cleavable ProTriTAC control molecule was present in circulation for a longer time than the non-masked non-cleavable ProTriTAC control, thereby indicating that masking plays a role in increased circulation half-life (t_{1/2}) and limited peripheral T cell binding. The combination of the functional masking that renders ProTriTAC inert outside the tumor environment and the half-life differential that renders any aberrantly activated ProTriTAC in circulation to be rapidly cleared in vivo works together to ensure on-target, off-tumor activity of ProTriTAC is minimized. Supporting pharmacokinetic parameters are shown in Table 4.

TABLE 4
Pharmacokinetics of ProTriTAC, Activated
ProTriTAC and control molecules

| | Terminal t_{1/2} | Cₘₐₓ | AUC, 0-last | Clearance |
|---|---|---|---|---|
| Test Article | (hr) | (nM) | (hr*nM) | (mL/hr/kg) |
| Control #1 (No mask, | 118 | 48.2 | 2490 | 0.735 |
| non-cleavable) | | | | |
| Control #2 (Masked, | 211 | 58.0 | 7000 | 0.238 |
| non-cleavable) | | | | |
| ProTriTAC | 101 | 42.7 | 2670 | 0.686 |
| Activated ProTriTAC | 0.969 | 66.6 | 41.5 | 58.5 |

[0173] D) Protease Activation of ProTriTAC Molecule Leads to Significantly Enhanced Activity In Vitro

[0174] The aim of this study was to assess the relative potency of protease activatable ProTriTAC molecules, non-cleavable ProTriTAC molecules and recombinant active drug fragment mimicking the protease-activated ProTriTAC molecule, in CD3 binding and T cell mediated cell killing. The active drug fragment mimicking the protease activated ProTriTAC molecule contained the CD3 binding domain and the target antigen binding domain but lacked the albumin binding domain. Whereas the protease activatable ProTriTAC molecule contained the albumin binding domain comprising a masking domain and a protease cleavable site, the CD3 binding domain, and the target antigen binding domain. The non-cleavable ProTriTAC molecule lacked the protease cleavable site but was otherwise identical to the protease activatable ProTriTAC molecule.

[0175] Purified ProTriTAC (labeled as prodrug in FIGS. 10-12), non-cleavable ProTriTAC (labeled as prodrug (non-cleavable) in FIGS. 10-12), and recombinant active drug fragment mimicking the protease-activated ProTriTAC (labeled as active drug in FIGS. 10-12) were tested for binding to recombinant human CD3 in an ELISA assay (FIG. 10), binding to purified human primary T cells in a flow cytometry assay (FIG. 11), and functional potency in a T cell-dependent cellular cytotoxicity assay (FIG. 12).

[0176] For ELISA, soluble test molecules (i.e., active drug, prodrug, and prodrug (non-cleavable) at the indicated concentrations were incubated, in multi-well plates, with immobilized recombinant human CD3a (R&D Systems) for 1 hour at room temperature in PBS supplemented with 15 mg/mL human serum albumin. Plates were blocked using SuperBlock (Thermo Fisher), washed using PBS with 0.05% Tween-20, and detected using a non-competitive anti-CD3 idiotype monoclonal antibody 11D3 followed by peroxidase-labeled secondary antibody and TMB-ELISA substrate solution (Thermo Fisher). Results shown in FIG. 10 demonstrate that the active drug fragment mimicking the protease-activated ProTriTAC molecule was about 250 times more potent in binding CD3 as compared to prodrug non-cleavable. The EC₅₀ values are provided in Table 5. The masking ratio is the ratio between the prodrug EC₅₀ over the active drug EC₅₀: the higher the number, the higher the fold-shift between prodrug and active drug and thus greater functional masking.

TABLE 5
CD3 binding potential

| | EC₅₀ (nM) | Masking Ratio |
|---|---|---|
| Active Drug | 0.16 | — |
| Prodrug | 11.91 | 74 |
| Prodrug (non-cleavable) | 39.44 | 247 |

[0177] For binding to human primary T cells, determined by flow cytometry, soluble test molecules (i.e., active drug, prodrug, and prodrug (non-cleavable)) at the indicated concentrations (shown in FIG. 11) were incubated, in multi-well plates, with purified human primary T cells for 1 h at 4° C. in the presence of PBS with 2% fetal bovine serum and 15 mg/ml human serum albumin. Plates were washed with PBS with 2% fetal bovine serum, detected using AlexaFluor 647-labeled non-competitive anti-CD3 idiotype monoclonal antibody 11D3, and data was analyzed using FlowJo 10 (FlowJo, LLC). Results shown in FIG. 11 demonstrate that the active drug fragment mimicking the protease-activated ProTriTAC molecule was greater than 1000 times more potent in binding human primary T cells as compared to prodrug non-cleavable. The EC₅₀ values are provided in Table 6.

TABLE 6
Human primary T cell binding potential

| | EC₅₀ (nM) | Masking Ratio |
|---|---|---|
| Active Drug | 1.19 | — |
| Prodrug | >1000 | n/a |
| Prodrug (non-cleavable) | >1000 | n/a |

[0178] For functional potency in a T cell-dependent cellular cytotoxicity assays, soluble test molecules (i.e., active drug, prodrug, and prodrug (non-cleavable)) at the indicated concentrations, shown in FIG. 12, were incubated, in multi-well plates, with purified resting human T cells (effector cell) and HCT116 cancer cell (target cell) at 10:1 effector: target cell ratio for 48 h at 37° C. The HCT116 target cell line had been stably transfected with a luciferase reporter gene to allow specific T cell-mediated cell killing measurement by ONE-Glo (Promega). Results shown in FIG. 12 demonstrate that the active drug fragment mimicking the protease-activated ProTriTAC molecule was about 500 times more potent in T cell mediated killing of cancer cells, as compared to prodrug non-cleavable. The EC₅₀ values are provided in Table 7.

TABLE 7
T cell mediated cell killing potential

| | EC₅₀ (nM) | Masking Ratio |
|---|---|---|
| Active Drug | 0.004 | — |
| Prodrug | 0.485 | 121 |
| Prodrug (non-cleavable) | 2.197 | 549 |

### Example 7: Anti-Tumor Activity of Exemplary ProTriTAC Molecules Containing Various Exemplary Linkers, in an Admixed Mouse Tumor Model

[0179] The aim of this study was to explore the anti-tumor activity of ProTriTAC molecules containing different linkers. NSG female mice, 7 weeks old, were used for this study. At the commencement of the study, on day 0, the NSG female mice were injected with 2.5×10⁶ expanded human T cells, and 5×10⁶ HCT116 (human colorectal carcinoma) tumor cells. The following day, on day 1, the mice were divided into groups and each group was treated with at least one of the ProTriTAC molecules listed in Table 8 (SEQ ID Nos. 786-790), or with a control GFP TriTAC molecule (SEQ ID No. 792), or with a ProTriTAC molecule that contains a non-cleavable linker (NCLV) (SEQ ID No. 791).

[0180] The ProTriTAC molecules and the ProTriTAC NCLV molecule used in the following examples were targeted to EGFR and had the following orientation of the individual domains: (anti-albumin binding domain (sdAb): anti-CD3 domain (scFV): anti-EGFR domain (sdAb)). The only differences between the ProTriTAC molecules listed in Table 7 were in the linker sequences. The ProTriTAC molecules, ProTriTAC NCLV molecule, or the GFP TriTAC molecule (the GFP TriTAC molecule had the following orientation of individual domains: anti-GFP sdAb: anti-Alb sdAb: anti-CD3 scFv) were administered daily for a period of 10 days (i.e., final dose was administered on day 10 following injection of tumor cells and expanded cells to the animals) and tumor volumes were measured at regular intervals, beginning a few days prior to the administration of the final dose at day 10.

TABLE 8
Exemplary ProTriTAC molecules and linkers

| ProTriTAC | Linker in the | | Cleavability/Recognition of |
|---|---|---|---|
| molecule | ProTriTAC | | the linker sequence by |
| sequence | molecule | Linker Sequence | enzymes |
| SEQ ID No. 786 | L001 | KPLGLQARVV | MMP9 + matriptase |
| SEQ ID No. 787 | L040 | PQASTGRSGG | MMP9 + matriptase + uPA |
| SEQ ID No. 788 | L041 | PQGSTGRAAG | MMP9 + matriptase + uPA |
| SEQ ID No. 789 | L042 | PPASSGRAGG | matriptase + uPA |
| SEQ ID No. 790 | L045 | PIPVQGRAH | MMP9 + matriptase |
| | L043 (SEQ ID | PQGSTARSAG | MMP9 + matriptase + uPA |
| | No. 988) | | |

[0181] As shown in FIG. 18, the ProTriTAC molecules containing linker sequences L001, L045, L040, and L041 demonstrated more potent anti-tumor activity as compared to the GFP TriTAC control of the ProTriTAC NCLV molecule. The statistical significance of the data was determined by repeated measures one-way ANOVA-Dunnett post-test. The mean tumor volume of each group of mice were compared to the mean tumor volume of the mice group that received the NCLV molecule.

[0182] The pharmacokinetics following administration of the various molecules, as described above, were also assessed and the data is shown in FIG. 19. The control GFP TriTAC molecule was rapidly cleared from circulation, following administration, whereas the NCLV molecule remained in circulation for the longest time. The pharmacokinetic clearance profile of the test ProTriTAC molecules were in between the GFP TriTAC and NCLV, except for the ProTriTAC containing the linker sequence L001, which was cleared almost as rapidly as the control GFP TriTAC.

### Example 8: Individual Tumor Volumes of Admixed Xenograft Tumors, Following Treatment with Exemplary ProTriTAC Molecules Containing Various Exemplary Linkers

[0183] The ProTriTAC molecules listed in Table 7, the control GFP TriTAC molecule, and the ProTriTAC NCLV molecule were evaluated in an admixed xenograft model, in order to determine the efficacy of the ProTriTAC molecules containing different linkers, in vivo. As described in previous example (Example 7), the xenograft tumor model was generated by injecting 7 week old NSG mice with 2.5×10⁶ expanded human T cells, and 5×10⁶ HCT116 (human colorectal carcinoma) tumor cells. The mice were divided into groups and each group was treated with at least one of the ProTriTAC molecules listed in Table 7, with the control GFP TriTAC molecule, or with the ProTriTAC NCLV molecule. Tumor volumes were measured at regular intervals, starting from day 10 post injection of tumor cells and expanded T cells.

[0184] It was observed that in animals treated with the exemplary ProTriTAC molecules containing linker L040 there was a statistically significant delay in tumor growth as compared to the mice group which was treated with the control GFP TriTAC molecule, or the mice group that was treated with the ProTriTAC NCLV molecule. Similar observation was also made for the ProTriTAC molecules containing linker sequences L001, L041, and L045. The data is shown in FIG. 20.

[0185] It is also possible to carry out a similar study with xenograft models using other cell lines, such as A549 (non-small cell lung carcinoma) cells, DU-145 (prostate) cells, MCF-7 (breast) cells, Colo 205 (colon) cells, 3T3/]GF-IR (mouse fibroblast) cells, NCI H441 cells, HEP G2 (hepatoma) cells, MDA MB 231 (breast) cells, HT-29 (colon) cells, MDA-MB-435s (breast) cells, U266 cells, SH-SYSY cells, Sk-Mel-2 cells, NCI-H929, RPM18226, and A431 cells.

### Example 9: Demonstration of Reduced Cytokine Levels in Cynomolgus Monkeys, Correlated with Masking of TriTAC Molecules

[0186] In this study, cynomolgus monkeys were treated with three different concentrations (30 μg/kg; 300 μg/kg; and 1000 μg/kg) of an exemplary EGFR targeting ProTriTAC molecule containing a non-cleavable linker (ProTriTAC (NCLV), or with three different concentrations (10 μg/kg; 30 μg/kg; and 100 μg/kg) of an exemplary EGFR targeting TriTAC molecule (SEQ ID No. 793).

[0187] As shown in FIG. 21, after 4 hours following administering the ProTriTAC (NCLV) molecule, IFN-gamma IL-6 and IL-10 levels were significantly lower in comparison with administering the EGFR targeting TriTAC molecule.

### Example 10: Demonstration of Improved Tolerability in Mouse, Conferred by an Exemplary EGFR Targeting ProTriTAC Molecule

[0188] In this study, the tolerability of an exemplary EGFR targeting ProTriTAC molecule was assessed. Seven weeks old NSG female tumor free mice were intraperitoneally injected with 2×10⁷ expanded human T cells at the commencement of the study, i.e., at day 0. On day 2, treatment was started by dividing the mice into various groups and administering to them varying concentrations of the exemplary EGFR targeting ProTriTAC molecule, containing the linker sequence L001, an EGFR targeting TriTAC molecule, and an EGFR targeting ProTriTAC molecule containing a non-cleavable linker (ProTriTAC (NCLV). The molecules were administered once daily for 10 days, at the following dosages: 30 μg/kg, 100 μg/kg, 300 μg/kg Starting from day 2, body weight of the animals was recorded daily.

[0189] As shown in FIG. 22, the EGFR targeting ProTriTAC molecule containing a non-cleavable linker (ProTriTAC (NCLV)) and a GFP TriTAC (used as a negative control) were very well tolerated in mice even at the highest dose of 1000 μg/kg. The EGFR targeted ProTriTAC molecule containing the linker sequence of L001 was well tolerated at the dosage of 100 μg/kg, whereas the EGFR targeted TriTAC was well tolerated at 30 μg/kg. It was thus observed that the ProTriTAC containing the L001 linker sequence conferred about 3 fold increase in tolerability and the ProTriTAC (NCLV) conferred about a 30 fold increase in tolerability, in mouse. The mouse maximum tolerated dose for the ProTriTAC (NCLV) and TriTAC molecules was consistent with what was observed in cynomolgus monkeys.

[0190] To further explore the role of the linker in tolerability of the EGFR targeting ProTriTAC molecule in mouse, the linker sequence was changed from L001 to that of L040. In this experiment, seven weeks old NSG female tumor free mice were subcutaneously injected with 5×10⁶HCT116 tumor cells, at the commencement of the study, i.e., at day 0. At day 7 following the tumor cell injection, when the tumor volumes were about 180-200 mm³ (e.g., 183 mm³), the mice were injected intraperitoneally with 2×10⁷ expanded human T cells. Treatment was started on day 9, by dividing the mice into various groups and each group was administered an EGFR targeting TriTAC molecule, an EGFR targeting ProTriTAC molecule with linker sequence L040 (ProTriTAC(L040), and a ProTriTAC molecule containing a non-cleavable linker (ProTriTAC(NCLV). The molecules were administered once daily for 10 days, at the following dosages: 300 μg/kg and 1000 μg/kg. Starting from day 2, body weight of the animals were recorded daily. The results shown in FIG. 23 provide that the EGFR targeting ProTriTAC molecule with the linker sequence L040 conferred better tolerability than when the linker sequence L001 was used. The ProTriTAC (L040) was well-tolerated at 300 μg/kg and at 1000 μg/kg, with body weight percentage change comparable to that with the ProTriTAC (NCLV) molecule. It was thus observed that compared to the TriTAC molecule, the ProTriTAC containing the L040 linker sequence conferred about a 30 fold increase in tolerability, in mouse, similar to the 30 fold increase in tolerability observed with the ProTriTAC (NCLV) molecule.

### Example 11: Clinical Pathology Studies in Mice and Cynomolgus Monkeys

[0191] In this study, mice were treated with various concentrations of an EFGR targeting TriTAC molecule, an EGFR targeting ProTriTAC molecule containing the linker sequence L001 (ProTriTAC (L001), and an EGFR targeting ProTriTAC molecule containing a non-cleavable linker (ProTriTAC(NCLV)). Tolerability was assessed by measuring serum concentration of ALT (alanine aminotransferase) and AST (aspartate aminotransferase). Results are shown in FIGS. 24A, 24B, and 24C and FIGS. 25A, 25B, and 25C. It was observed that serum concentrations of AST and ALT were not elevated following administering the ProTriTAC (L001) at dosages up to 0.3 mg/kg, and that the serum concentrations of AST and ALT were not elevated following administering the ProTriTAC(NCLV) at dosages up to 1 mg/kg. In contrast, serum concentration of AST and ALT were not elevated following administering the TriTAC molecule at a dosage of 0.3 mg/kg.

[0192] In another study, cynomolgus monkeys were treated with various concentrations of an EFGR targeting TriTAC molecule, and an EGFR targeting ProTriTAC molecule containing a non-cleavable linker (ProTriTAC(NCLV)). Tolerability was assessed by measuring serum concentration of ALT (alanine aminotransferase) and AST (aspartate aminotransferase). Results are shown in FIG. 26. It was observed that serum concentrations of AST and ALT were not elevated following administering the ProTriTAC (NCLV) at dosages up to 1000 μg/kg. In contrast, serum concentration of AST and ALT were not elevated following administering the TriTAC molecule at a dosage of 10 μg/kg.

### Example 12: Demonstration of Therapeutic Window Expansion with an Exemplary ProTriTAC Molecule of this Disclosure in a Tumor-Bearing Mouse Model

[0193] The aim of this study was to evaluate the expansion of therapeutic window by measuring anti-tumor activity and observable on-target toxicity in the same tumor-bearing mice. NSG female mice, 7 weeks old, were used for this study.

[0194] At the commencement of the study, on day 0, the NSG female mice were injected with 2.5×10⁶ expanded human T cells, and 5×10⁶ HCT116 (human colorectal carcinoma) tumor cells. The following day, on day 1, the mice were divided into groups and each group was treated with either GFP TriTAC molecule (SEQ ID No. 792), EGFR TriTAC molecule (SEQ ID No. 793), or an EGFR targeting ProTriTAC molecule containing linker L040, (SEQ ID No. 787) at the indicated dose levels in FIGS. 27A-297D (for GFP TriTAC the dosage was 300 μg/kg; for EGFR TriTAC dosages were 10 μg/kg, 30 μg/kg, 100 μg/kg, and 300 μg/kg; for EGFR ProTriTAC dosages were 30 μg/kg, 100 μg/kg, 300 μg/kg, and 1000 μg/kg) and administered daily for a period of 10 days (i.e., final dose was administered on day 10 following injection of tumor cells and expanded cells to the animals) and tumor volumes were measured at regular intervals, beginning a few days prior to the administration of the final dose at day 10. Results shown in FIGS. 27A-27D.

[0195] On-target EGFR-related toxicity was determined by measuring the radius of the red scarring skin lesion above the original tumor implantation site with a caliper and applying the equation Area=(radius of lesion)² on day 14. Results provided in FIG. 28 show that an exemplary EGFR ProTriTAC has 30× better tolerability compared to an EGFR TriTAC in the same HCT116 tumor-bearing mice as measured by the onset of red scarring skin lesions above the original tumor implantation site. Therapeutic window is defined as the difference between the minimal dose level required for anti-tumor activity and the highest skin lesion-free dose level.

[0196] Results (from FIGS. 27 and 28) show that the exemplary protease-cleavable EGFR ProTriTAC is 3× less potent but 30× more tolerated (i.e., has a 10× improved therapeutic window) than the EGFR TriTAC when efficacy and toxicity are measured on the same tumor-bearing mice, as summarized in below Table. This would make it possible to dose the ProTriTAC at a dose that is about 3× higher than the TriTAC, to get at least the same efficiency and better tolerability.

| | | | Therapeutic |
|---|---|---|---|
| | Min efficacious dose | Max scar-free dose | Window |
| TriTAC | 10 μg/kg | 10 μg/kg | 1 |
| ProTriTAC | 30 μg/kg | 300 μg/kg | 10 |

### Example 13: An Exemplary ProTriTAC Molecule Containing a Dual Binding Moiety with Extended Non-CDR Loop into which a Human CD3ε Epitope is Grafted

[0197] The sequence of a dual binding moiety comprising non-CDR loops (AB, EF, C″D, and CC′) was obtained. A portion of the human CD3ε sequence was grafted into the CC′ loop of the non-CDR loops within the dual binding moiety, along with glycine residues to further extend the CC′ loop. FIG. 29 illustrates three different variants comprising 10, 12, or 16 amino acid extensions to the CC′ loop. In case of the variant CC10, the portion of human CD3a sequence grafted into the CC′ loop, to replace the wild type sequence of APGKG was QDGNEE (SEQ ID NO. 801), and in addition 4 glycine residues were inserted to extend the CC′ loop. In case of the variant CC12, the portion of human CDR sequence grafted into the CC′ loop, to replace the wild type sequence of APGKG was QDGNEEMGG (SEQ ID No. 802), and in addition 3 glycine residues were inserted to extend the CC′ loop. In case of the variant CC12, the portion of human CDR sequence grafted into the CC′ loop, to replace the wild type sequence of APGKG was QDGNEEMGG (SEQ ID No. 803), and in addition 7 glycine residues were inserted to extend the CC′ loop. The dual binding moiety comprising extended non-CDR loops comprising the CD3a sequences, as described above, were cloned into a vector further comprising coding sequences for a protease cleavable linker, a scFv containing a CD3 binding domain, and an EGFR binding domain, to express a ProTriTAC molecule. The ProTriTAC molecule contained an exemplary dual binding moiety of this disclosure, a CD3 binding scFv, and an EGFR binding domain. The ProTriTAC molecule was subsequently exposed to a tumor associated protease, matriptase, to assay activation of the molecule upon cleavage of the protease cleavable linker, which separates the dual binding moiety (depicted as aALB in FIGS. 29 and 30) comprising the cleavable linker from the rest of the molecule, i.e., the scFv containing the CD3 binding domain (depicted as aCD3 in FIGS. 29 and 30) and the EGFR binding domain (aEGFR). FIG. 30 shows the activation of the ProTriTAC molecules, containing the CC10, CC12, or CC16 variants of CC′ non-CDR loop, CD3 binding scFv in a VH-VL (left panel) or a VL-VH (right panel) format, upon treatment with matriptase. A ProTriTAC molecule containing a wild-type CC′ loop in the dual binding moiety was used as a control for the protease activation assay. In addition, a TriTAC molecule that is not in the “pro” form, i.e., a molecule that includes the same domains as the ProTriTAC molecule, except that it has a half-life extension domain, such as albumin, instead of a dual binding moiety, was also treated with matriptase and used as a control. Results indicated that the ProTriTAC molecules were activated upon cleavage, to generate a free albumin binding domain (depicted as Free aALB in FIG. 30) whereas the albumin domain did not separate from the TriTAC molecules. Thus, the ProTriTAC molecules containing a dual binding moiety of this disclosure was able to readily dissociate from half-life extending domain upon cleavage in a tumor microenvironment, unlike the TriTAC versions, and thereby were amenable to rapid clearance from the systemic circulation upon activation.

[0198] Further studies were carried out to assay the binding of the dual binding moiety containing the human CD3ε to CD3. It was observed that the activated forms of ProTriTAC molecules that contained the dual binding moiety containing the human CD3ε were about 20 times potent in binding CD3 than their activated forms which did not contain the dual binding moiety. Results are shown in FIG. 31.

[0199] Cell killing potential of a ProTriTAC molecule that contained a dual binding moiety as described herein was also assayed in a study where CaOV4 cell line was treated with the ProTriTAC molecule or its activated form. As shown in FIG. 32, the ProTriTAC molecule containing the CC16 variant of CC′ non-CDR loop was about 20 times more potent in killing cancer cells compared to its activated form, which was separated from the albumin binding domain.

### Example 14: Soft Library Mutagenesis Identified CC′ Loop as Most Amenable to Modification

[0200] To identify locations within the non-CDR loops (AB, CC′, C″D, and EF) that were most amenable to modification, for creating a masking capability, libraries were assembled and generated using four groups of overlapping DNA oligos containing randomized degenerate “NNK” codons and with different loop lengths, as indicated in the schematic below:

| AB loop oligos: | |
|---|---|
| (SEQ ID NO: 972) | |
| WT: | LVQPGN(20%) |
| AB0: | XXXXXX (20%) |
| AB1: | XXXXXXX (20%) |
| AB2: | XXXXXXXX (20%) |
| AB3: | XXXXXXXXX (20%) |
| CC′ loop oligos: | |
| WT: | APGKG(20%) |
| CC0: | XXXXX (20%) |
| CC1: | XXXXXX (20%) |
| CC2: | XXXXXXX (20%) |
| CC3: | XXXXXXXX (20%) |
| C″D loop oligos: | |
| (SEQ ID NO: 973) | |
| WT: | DSVKGR(20%) |
| CD0: | XXXXXX (20%) |
| CD1: | XXXXXXX (20%) |
| CD2: | XXXXXXXX (20%) |
| CD3: | XXXXXXXXX (20%) |
| EF loop oligos: | |
| (SEQ ID NO: 974 | |
| WT: | SLRPED(20%) |
| EF0: | XXXXXX (20%) |
| EF1: | XXXXXXX (20%) |
| EF2: | XXXXXXXX (20%) |
| EF3: | XXXXXXXXX (20%) |

[0201] Note: “X” denotes a randomized residue (“NNK” codon) that could be any of the 20 natural amino acids as well as stop codon. The goal was to have approximately 20% of each non-CDR loop be wild-type. These wild-type oligos served as internal benchmarks to gauge the tolerance of each loop to modification (sequence composition and/or length changes). A loop that was less tolerable to change could easily revert to wild-type; in contrast, a loop that was highly amenable to change would maintain the diverse sequence repertoire. To this end, 24 clones were sequenced from the naive library to verify the randomization of non-CDR loops prior to panning with HAS, as shown in FIG. 33. After two rounds of phage panning against HSA, 30 clones were sequenced to examine the non-CDR loop composition. The results showed that 3 out of 4 non-CDR loops (AB, C″D, and EF) mostly utilized the 20% wild-type oligo and reverted back to the wild-type, suggesting that they may be less preferred than the wild-type sequence. However, the CC′ loop kept the diverse sequence repertoire (both sequence and length), suggesting that the CC′ loop may be the loop most tolerable to randomization that we could exploit for specific masking of adjacent domains, as shown in FIG. 34.

### Example 15: Construction of an Exemplary Dual Binding Moiety which Binds to IL-2 and a Target Antigen Binding Domain Whose Target is EGFR

[0202] The sequence of an engineered protein scaffold comprising CDR loops capable of binding albumin and non-CDR loops is obtained. Overlapping PCR is used to introduce random mutations in the non-CDR loop regions, thereby generating a library. The resultant sequences are cloned into a phage display vector, thereby generating a phage display library. Escherichia coli cells are transformed with the library and used to construct a phage display library. ELISA is performed using an immobilized target antigen binding domain with specificity for EGFR. A clone with high specificity for EGFR is selected. Affinity maturation is performed by re-randomizing residues in the non-CDR loop regions as before.

[0203] Sequence alignment of non-CDR loop regions of the resultant proteins is performed to determine sequence conservation between proteins with high affinity for the target antigen binding domain. Site directed mutagenesis of one or more amino acids within these regions of sequence conservation is performed to generate additional proteins. Binding of the resultant proteins to an immobilized target antigen binding domain whose target is EGFR is measured in an ELISA. A protein with the highest affinity for the target antigen binding domain is selected.

[0204] The sequence of this protein is cloned into a vector comprising a sequence for a cleavable linker. The resultant vector is expressed in a heterologous expression system to obtain a dual binding moiety comprising a cleavable linker and non-CDR loops which provide a binding site specific for a target antigen binding domain whose target is EGFR and CDR loops which are specific for IL-2.

### Example 16: Construction of an Exemplary Conditionally Active Chimeric Antigen Receptor

[0205] The dual binding moiety of Example 15 is cloned into an expression vector comprising the components of a chimeric antigen receptor, namely anti-PSMAscFv-IgG4-CD28tm-CD28costim-CD3zeta, to obtain a vector coding for a conditionally active chimeric antigen receptor. Primary human peripheral blood derived T-cells are activated and then lentivirally transduced with the conditionally active chimeric antigen receptor vector to obtain the conditionally active chimeric antigen receptor according to the present disclosure.

### Example 17: Construction of an Exemplary Conditionally Active T-Cell Receptor Fusion Protein

[0206] The dual binding moiety of Example 15 is cloned into an expression vector comprising the components of a T-cell receptor fusion protein, namely anti-PSMAscFv-IgG4-CD28tm-CD3epsilon, to obtain a vector coding for a conditionally active T-cell receptor fusion protein. Primary human peripheral blood derived T-cells are activated and then lentivirally transduced with the conditionally active T-cell receptor fusion protein vector to obtain the conditionally active T-cell receptor fusion protein according to the present disclosure.

### Example 18: Construction of an Exemplary Conditionally Active T-Cell Receptor

[0207] The dual binding moiety of Example 1 is cloned into an expression vector comprising the components of a T-cell receptor to obtain a vector coding for a conditionally active T-cell receptor. Primary human peripheral blood derived T-cells are activated and then lentivirally transduced with the conditionally active T-cell receptor vector to obtain the conditionally active T-cell receptor according to the present disclosure.

### Example 19: T-Cells Comprising a Conditionally Active Chimeric Antigen Receptor Exhibit Reduced Specificity Towards Cell Line which Overexpresses PSMA but is Protease Deficient

[0208] Cells overexpressing PSMA and exhibiting low expression of a matrix metalloprotease are separately incubated with T-cells comprising an exemplary conditionally active chimeric antigen receptor according to the present disclosure and T-cells comprising a non-conditionally active control chimeric antigen receptor. Cells expressing normal levels of PSMA and proteases are also incubated with T-cells comprising a conditionally active chimeric antigen receptor according to the present disclosure and T-cells comprising a non-conditionally active control chimeric antigen receptor. Both receptors comprise a target antigen binding domain with specificity toward PSMA.

[0209] Results indicate that in the absence of protease secretion, the T-cells comprising a conditionally active chimeric antigen receptor of the present disclosure interact with the protease expressing cells but do not interact with the PSMA expressed on the surface of the protease deficient cells. In contrast, the T-cells comprising a non-conditionally active control chimeric antigen receptor lack the ability to selectively bind the protease expressing cells over the protease deficient ones. Thus, the T-cells comprising an exemplary conditionally active chimeric antigen receptor of the present disclosure are advantageous, for example, in terms of reducing off-tumor toxicity.

### Example 20: T-Cells Comprising a Conditionally Active T-Cell Receptor Fusion Protein Exhibit Reduced Specificity Towards Cell Line which Overexpresses PSMA but is Protease Deficient

[0210] Cells overexpressing PSMA and exhibiting low expression of a matrix metalloprotease are separately incubated with T-cells comprising an exemplary conditionally active T-cell receptor fusion protein according to the present disclosure and T-cells comprising a non-conditionally active control T-cell receptor fusion protein. Cells expressing normal levels of PSMA and proteases are also incubated with T-cells comprising a conditionally active T-cell receptor fusion protein according to the present disclosure and T-cells comprising a non-conditionally active control T-cell receptor fusion protein. Both receptors comprise a target antigen binding domain with specificity toward PSMA.

[0211] Results indicate that in the absence of protease secretion, the T-cells comprising a conditionally active T-cell receptor fusion protein of the present disclosure interact with the protease expressing cells but do not interact with the PSMA expressed on the surface of the protease deficient cells. In contrast, the T-cells comprising a non-conditionally active control T-cell receptor fusion protein lack the ability to selectively bind the protease expressing cells over the protease deficient ones. Thus, the T-cells comprising an exemplary conditionally active T-cell receptor fusion protein of the present disclosure are advantageous, for example, in terms of reducing off-tumor toxicity.

### Example 21: T-Cells Comprising a Conditionally Active T-Cell Receptor Exhibit Reduced Specificity Towards Cell Line which Overexpresses PSMA but is Protease Deficient

[0212] Cells overexpressing PSMA and exhibiting low expression of a matrix metalloprotease are separately incubated with T-cells comprising an exemplary conditionally active T-cell receptor according to the present disclosure and T-cells comprising a non-conditionally active control T-cell receptor. Cells expressing normal levels of PSMA and proteases are also incubated with T-cells comprising a conditionally active T-cell receptor according to the present disclosure and T-cells comprising a non-conditionally active control T-cell receptor. Both receptors comprise a target antigen binding domain with specificity toward PSMA.

[0213] Results indicate that in the absence of protease secretion, the T-cells comprising a conditionally active T-cell receptor of the present disclosure interact with the protease expressing cells but do not interact with the PSMA expressed on the surface of the protease deficient cells. In contrast, the T-cells comprising a non-conditionally active control T-cell receptor lack the ability to selectively bind the protease expressing cells over the protease deficient ones. Thus, the T-cells comprising an exemplary conditionally active T-cell receptor of the present disclosure are advantageous, for example, in terms of reducing off-tumor toxicity.

### Example 22: Treatment with an Exemplary Conditionally Active Chimeric Antigen Receptor of the Present Disclosure Inhibits In Vivo Tumor Growth

[0214] Murine tumor line CT26 is implanted subcutaneously in Balb/c mice and on day 7 post-implantation the average size of the tumor is measured. Test mice are treated with T-cells comprising an exemplary conditionally active chimeric antigen receptor which has a target antigen binding domain specific for EGFR where in the EGFR-specific domain is bound to a dual binding moiety via its non-CDR loops and the dual binding moiety comprises a cleavable linker and CDR loops specific for IL-2. Control mice are treated with T-cells comprising a chimeric antigen receptor that contains a EGFR-specific domain but does not contain the dual binding moiety or the cleavable linker, and is not conditionally active. Results show that treatment with T-cells comprising an exemplary conditionally active chimeric antigen receptor of the present disclosure inhibits tumor more efficiently than the comparator T-cells comprising a chimeric antigen receptor which does not contain the moiety with non-CDR loops.

### Example 23: Treatment with an Exemplary Conditionally Active T-Cell Receptor Fusion Protein of the Present Disclosure Inhibits In Vivo Tumor Growth

[0215] Murine tumor line CT26 is implanted subcutaneously in Balb/c mice and on day 7 post-implantation the average size of the tumor is measured. Test mice are treated with T-cells comprising an exemplary conditionally active T-cell receptor fusion protein which has a target antigen binding domain specific for EGFR where in the EGFR-specific domain is bound to a dual binding moiety via its non-CDR loops and the dual binding moiety comprises a cleavable linker and CDR loops specific for IL-2. Control mice are treated with T-cells comprising a T-cell receptor fusion protein that contains a EGFR-specific domain but does not contain the dual binding moiety or the cleavable linker, and is not conditionally active. Results show that treatment with T-cells comprising an exemplary conditionally active T-cell receptor fusion protein of the present disclosure inhibits tumor more efficiently than the comparator T-cells comprising a T-cell receptor fusion protein which does not contain the moiety with non-CDR loops.

### Example 24: Treatment with an Exemplary Conditionally Active T-Cell Receptor of the Present Disclosure Inhibits In Vivo Tumor Growth

[0216] Murine tumor line CT26 is implanted subcutaneously in Balb/c mice and on day 7 post-implantation the average size of the tumor is measured. Test mice are treated with T-cells comprising an exemplary conditionally active T-cell receptor which has a target antigen binding domain specific for EGFR where in the EGFR-specific domain is bound to a dual binding moiety via its non-CDR loops and the dual binding moiety comprises a cleavable linker and CDR loops specific for IL-2. Control mice are treated with T-cells comprising a T-cell receptor that contains a EGFR-specific domain but does not contain the dual binding moiety or the cleavable linker, and is not conditionally active. Results show that treatment with the T-cells comprising an exemplary conditionally active T-cell receptor of the present disclosure inhibits tumor more efficiently than the comparator T-cells comprising a T-cell receptor which does not contain the moiety with non-CDR loops.

### Example 25: Conditionally Active Receptor Constructs

[0217] FIGS. 38A-F show examples of receptor constructs which were generated as disclosed herein. Each construct comprises an intracellular domain comprising a CD8 hinge/transmembrane domain (SEQ ID NO: 823), a 4-1BB intracellular domain (SEQ ID NO: 824), and a CD3 zeta intracellular domain (SEQ ID NO: 825). Construct C1081 (SEQ ID NO: 804; FIG. 38A) does not comprise a target antigen binding domain or a dual binding moiety. Construct C1824 (SEQ ID NO: 805; FIG. 38B) comprises the target antigen binding domain EH4 (SEQ ID NO: 821) but does not comprise a dual binding moiety. Construct 1826 (SEQ ID NO: 806; FIG. 38C) comprises target antigen binding domain EH4 and the dual binding moiety 10G with an unmodified non-CDR loop (SEQ ID NO: 817) along with a non-cleavable linker (SEQ ID NO: 826). Construct 1950 (SEQ ID NO: 807; FIG. 38D) comprises target antigen binding domain EH4 and dual binding moiety 10G with a modified non-CDR loop (SEQ ID NO: 818) along with a non-cleavable linker (SEQ ID NO: 826). Construct 2031 (SEQ ID NO: 808; FIG. 38E) comprises target antigen binding domain EH4 and dual binding moiety 10G with a modified non-CDR loop (SEQ ID NO: 818) along with protease cleavable linker 1 (SEQ ID NO: 827).

[0218] FIGS. 44A-44H show examples of receptor constructs which were generated as disclosed herein. Construct C1081 (SEQ ID NO: 804; FIG. 44A) does not comprise a target antigen binding domain or a dual binding moiety. Construct 1827 (SEQ ID NO: 809; FIG. 44B) comprises the target antigen binding domain EH104 (SEQ ID NO: 822) but does not comprise a dual binding moiety. Construct 1829 (SEQ ID NO: 810; FIG. 44C) comprises target antigen binding domain EH104 and the dual binding moiety 10G with an unmodified non-CDR loop (SEQ ID NO: 817) along with a non-cleavable linker (SEQ ID NO: 826). Construct 1952 (SEQ ID NO: 811; FIG. 44D) comprises target antigen binding domain EH104 and dual binding moiety 10G with a modified non-CDR loop (SEQ ID NO: 819) along with a non-cleavable linker (SEQ ID NO: 826). Construct 1954 (SEQ ID NO: 812; FIG. 44E) comprises target antigen binding domain EH104 and dual binding moiety 10G with a modified non-CDR loop (SEQ ID NO: 59) along with a non-cleavable linker (SEQ ID NO: 820). Construct 2033 (SEQ ID NO: 813; FIG. 44F) comprises target antigen binding domain EH104 and dual binding moiety 10G with a modified non-CDR loop (SEQ ID NO: 819) along with protease cleavable linker 1 (SEQ ID NO: 827). Construct 1953 (SEQ ID NO: 814; FIG. 44G) comprises target antigen binding domain EH104 and dual binding moiety 10G with a modified non-CDR loop (SEQ ID NO: 820) along with protease cleavable linker 2 (SEQ ID NO: 828). Construct 2035 (SEQ ID NO: 815; FIG. 44H) comprises target antigen binding domain EH104 and dual binding moiety 10G with a modified non-CDR loop (SEQ ID NO: 820) along with protease cleavable linker 1 (SEQ ID NO: 827).

### Example 26: Inhibition of CAR-T Cell Killing Activity by Modified Non-CDR Loop Mask

[0219] Chimeric antigen receptor-expressing T-cells (CAR T-cells) were generated by infecting isolated CD4/CD8 positive T cells from a healthy donor with lentivirus expressing the indicated constructs. FIG. 38 shows a diagram with the constructs used. CAR T-cells were mixed at a 10:1 ratio with EGFR-expressing cancer cells HCT116, engineered to express luciferase. After 72 hours, luciferase activity was measured as a readout of HCT116 viability. CAR-T cells that lacked a target antigen binding domain (C1081) were used as a negative control. The assay was performed with or without human serum albumin (HSA), as indicated.

[0220] The results of this experiment are shown in FIG. 39. These results indicate that HSA has weak steric blocking activity of CAR T-cell killing activity. These results also demonstrate that the construct containing dual binding moiety 10G with a modified non-CDR loop (C1950) significantly blocks cell killing activity.

### Example 27: Chimeric Antigen Receptor Binding to EGFR

[0221] Chimeric antigen receptor-expressing T-cells (CAR T-cells) were generated by infecting isolated CD4/CD8 positive T cells from a healthy donor with lentivirus expressing the indicated constructs. FIG. 38 shows a diagram with the constructs used. Cells were incubated with Fc-tagged EGFR extracellular domain (ECD). Cells were washed to remove unbound Fc-tagged EGFR ECD. Cells were incubated with a secondary antibody conjugated to DyLight 650 that recognizes human Fc. Binding of the secondary antibody to cells was measured by flow cytometry.

[0222] The results of this experiment are shown in FIG. 40. Masked EH4 ProCAR (C1950, comprising dual binding moiety 10G with a modified non-CDR loop) demonstrated no detectable binding to its antigen EGFR-Fc while the positive controls (C1824, construct comprising the binding domain EH4 but devoid of dual binding moiety 10G) bound strongly.

[0223] The construct C1826, comprising the EGFR binding domain EH4 and the anti-ALB binding moiety 10G with an unmodified non-CDR loop and a non-cleavable linker, i.e., without masking of EH4 binding domain, shows very little steric blocking. This indicates that the anti-ALB binding domain on its own without the mask shows very little steric blocking and that the blocking of EGFR binding, seen in case of C1950, is an effect of the masking.

### Example 28: Protease Activation of Conditionally Active Chimeric Antigen Receptors to EGFR

[0224] Chimeric antigen receptor-expressing T-cells (CAR T-cells) were generated by infecting isolated CD4/CD8 positive T cells from a healthy donor with lentivirus expressing the indicated constructs. FIG. 38 shows a diagram with the constructs used. CAR T-cells expressing C2031 were treated with either PBS or recombinant uPA protease, as indicated, for 1 hour at room temperature. All other samples were treated with PBS for 1 hour at room temp. Cells were incubated with Fc-tagged EGFR extracellular domain (ECD) and mouse anti-FLAG antibody. Cells were washed to remove unbound Fc-tagged EGFR ECD and anti-FLAG antibody. Cells were incubated with a secondary antibody conjugated to DyLight 650 that recognizes human Fc and a secondary antibody conjugated to BV421 that recognizes mouse antibodies. Binding of the secondary antibodies to cells was measured by flow cytometry. Samples were analyzed using FLOWJO® software to bin CAR T-cells into low, medium, and high expression groups based on anti-FLAG/BV421 staining. This served to normalize expression between different constructs.

[0225] The results of this experiment are shown in FIG. 41. Treatment of the cells expressing the conditionally activated chimeric antigen receptor, C2031, with uPA activated EGFR-binding activity to the same level as the positive control cells expressing C1824.

### Example 29: Protease Cleavage Site-Dependent Activation of CAR T-Cell Activity

[0226] Chimeric antigen receptor-expressing T-cells (CAR T-cells) were generated by infecting isolated CD4/CD8 positive T cells from a healthy donor with lentivirus expressing the indicated constructs. FIG. 38 shows a diagram with the constructs used. CAR T-cells were mixed at a 10:1 ratio with EGFR-expressing cancer cells HCT116, engineered to express luciferase. After 72 hours, luciferase activity was measured as a readout of HCT116 viability. CAR-T cells that lacked a target antigen binding domain (C1081) were used as a negative control.

[0227] The results of this experiment are shown in FIG. 42. The CAR T-cell expressing a receptor without a protease cleavage site (C1950) showed little cell killing activity. The CAR T-cell expressing a receptor with a protease cleavage site (C2031) showed significant cell killing activity.

### Example 30: In Vivo Masking with Non-Cleavable ProCAR Constructs

[0228] NSG mice were subcutaneously implanted with an admixture of HCT116 cancer cells and the indicated CAR-T cells from FIG. 38 at a ratio of 1:1. Tumor volume was measured at the indicated days post-implantation. The results of this experiment are show in FIG. 43. While the CAR-T expressing a receptor with only a target binding domain (C1824) was able to inhibit tumor formation, the CAR-T cell expressing a receptor with a dual binding moiety containing a modified non-CDR loop and a non-cleavable protease linker (C1950) had no activity. Significance was determined by using unpaired t test between groups. *** denotes p<0.0005.

### Example 31: Inhibition of CAR-T Cell Killing Activity by Modified Non-CDR Loop Mask

[0229] Chimeric antigen receptor-expressing T-cells (CAR T-cells) were generated by infecting isolated CD4/CD8 positive T cells from a healthy donor with lentivirus expressing the indicated constructs. FIG. 44 shows a diagram with the constructs used. CAR T-cells were mixed at a 10:1 ratio with EGFR-expressing cancer cells HCT116, engineered to express luciferase. After 72 hours, luciferase activity was measured as a readout of HCT116 viability. CAR-T cells that lacked a target antigen binding domain (C1081) were used as a negative control.

[0230] The results of this experiment are shown in FIG. 45. These results demonstrate that the construct containing binding domain 10G with a modified non-CDR loop (C1952 and 1954) significantly blocks cell killing activity. The construct containing binding domain 10G without a modified non-CDR loop (C1829) did not block cell killing activity.

### Example 32: Chimeric Antigen Receptor Binding to EGFR

[0231] Chimeric antigen receptor-expressing T-cells (CAR T-cells) were generated by infecting isolated CD4/CD8 positive T cells from a healthy donor with lentivirus expressing the indicated constructs. FIG. 44 shows a diagram with the constructs used. Cells were incubated with Fc-tagged EGFR extracellular domain (ECD). Cells were washed to remove unbound Fc-tagged EGFR ECD. Cells were incubated with a secondary antibody conjugated to DyLight 650 that recognizes human Fc. Binding of the secondary antibody to cells was measured by flow cytometry.

[0232] The results of this experiment are shown in FIG. 46. C1954 and C1952, each comprising binding domain 10G with a unique modified non-CDR loop, show no detectable binding to EGFR-Fc, while positive control C1827 (construct comprising the target antigen binding domain EH104 but no dual binding moiety) binds strongly.

[0233] The construct C1829, comprising the EGFR binding domain EH104 and the anti-ALB binding moiety 10G with an unmodified non-CDR loop and a non-cleavable linker, i.e., without masking of EH4 binding domain, shows very little steric blocking. This indicates that the anti-ALB binding domain on its own without the mask shows very little steric blocking and that the blocking of EGFR binding, seen in case of C1954 and C1952, is an effect of the masking.

### Example 33: Protease Activation of Conditionally Active Chimeric Antigen Receptors to EGFR

[0234] Chimeric antigen receptor-expressing T-cells (CAR T-cells) were generated by infecting isolated CD4/CD8 positive T cells from a healthy donor with lentivirus expressing the indicated constructs. FIG. 44 shows a diagram with the constructs used. CAR T-cells expressing C2033 were treated with either PBS or recombinant uPA protease, as indicated, for 1 hour at room temperature. All other samples were treated with PBS for 1 hour at room temp. Cells were incubated with Fc-tagged EGFR extracellular domain (ECD) and mouse anti-FLAG antibody. Cells were washed to remove unbound Fc-tagged EGFR ECD and anti-FLAG antibody. Cells were incubated with a secondary antibody conjugated to DyLight 650 that recognizes human Fc and a secondary antibody conjugated to BV421 that recognizes mouse antibodies. Binding of the secondary antibodies to cells was measured by flow cytometry. Samples were analyzed using FLOWJO® software to bin CAR T-cells into low, medium, and high expression groups based on anti-FLAG/BV421 staining. This served to normalize expression between different constructs.

[0235] The results of this experiment are shown in FIG. 47A-47C. Treatment of C2033 expressing cells with uPA activated EGFR-binding activity.

### Example 34: Protease Activation of Conditionally Active Chimeric Antigen Receptors to EGFR

[0236] Chimeric antigen receptor-expressing T-cells (CAR T-cells) were generated by infecting isolated CD4/CD8 positive T cells from a healthy donor with lentivirus expressing the indicated constructs. FIG. 44 shows a diagram with the constructs used. CAR T-cells expressing C2035 were treated with either PBS or recombinant uPA protease, as indicated, for 1 hour at room temperature. All other samples were treated with PBS for 1 hour at room temp. Cells were incubated with Fc-tagged EGFR extracellular domain (ECD) and mouse anti-FLAG antibody. Cells were washed to remove unbound Fc-tagged EGFR ECD and anti-FLAG antibody. Cells were incubated with a secondary antibody conjugated to DyLight 650 that recognizes human Fc and a secondary antibody conjugated to BV421 that recognizes mouse antibodies. Binding of the secondary antibodies to cells was measured by flow cytometry. Samples were analyzed using FLOWJO® software to bin CAR T-cells into low, medium, and high expression groups based on anti-FLAG/BV421 staining. This served to normalize expression between different constructs.

[0237] The results of this experiment are shown in FIGS. 48A-48C. Treatment of C2035 expressing cells with uPA activated EGFR-binding activity.

### Example 35: Protease Cleavage Site-Dependent Activation of CAR T-Cell Activity

[0238] Chimeric antigen receptor-expressing T-cells (CAR T-cells) were generated by infecting isolated CD4/CD8 positive T cells from a healthy donor with lentivirus expressing the indicated constructs. FIG. 44 shows a diagram with the constructs used. CAR T-cells were mixed at a 10:1 ratio with EGFR-expressing cancer cells HCT116, engineered to express luciferase. After 72 hours, luciferase activity was measured as a readout of HCT116 viability. CAR-T cells that lacked a target antigen binding domain (C1081) were used as a negative control.

[0239] The results of this experiment are shown in FIG. 49. The CAR T-cell expressing a receptor without a protease cleavage site (C1954) showed little cell killing activity. The CAR T-cell expressing a receptor with a protease cleavage site (C1953) showed significant cell killing activity.

### Example 36: Protease Activation of CAR T-Cell Killing Activity

[0240] Chimeric antigen receptor-expressing T-cells (CAR T-cells) were generated by infecting isolated CD4/CD8 positive T cells from a healthy donor with lentivirus expressing the indicated constructs. FIG. 44 shows a diagram with the constructs used. CAR-T cells were washed once with PBS and then treated with either PBS or PBS containing 400 nM recombinant uPA protease for 1 hour at room temperature. CAR-T cells were then mixed at a 40:1 ratio with EGFR-expressing HCT116 cells engineered to express luciferase. After 24 hours luciferase activity was measured as a readout of HCT116 viability. CAR-T cells that lacked a target antigen binding domain (C1081) were used as a negative control.

[0241] The results of this experiment are shown in FIG. 50. Cells expressing the non-cleavable receptor C1952 showed little cell killing activity. Cells expressing the cleavable receptor C2033 showed moderate cell killing, which was further increased by treatment with recombinant uPA protease.

### Example 37: Protease Activation of CAR T-Cell Killing Activity

[0242] Chimeric antigen receptor-expressing T-cells (CAR T-cells) were generated by infecting isolated CD4/CD8 positive T cells from a healthy donor with lentivirus expressing the indicated constructs. FIG. 44 shows a diagram with the constructs used. CAR-T cells were then mixed at a 10:1 ratio with HCT116 cells engineered to express luciferase in T cell culture media with or without 100 nM recombinant Matriptase protease. After 72 hours luciferase activity was measured as a readout of HCT116 viability. CAR-T cells that lacked a target antigen binding domain (C1081) were used as a negative control.

[0243] The results of this experiment are shown in FIG. 51. Cells expressing the non-cleavable receptor C1954 showed little cell killing activity. Cells expressing the cleavable receptor C2035 showed moderate cell killing activity, which was further increased by treatment with recombinant Matriptase protease.

### Example 38: Construction and Testing of Exemplary Multivalent Target Binding Proteins Constructs

[0244] The following constructs were made. Construct C2446 includes an anti-human serine albumin sdAb, a protease cleavage site 3, an anti-human EGFR sdAb, a FLAG epitope, a CD8 hinge/transmembrane domain, a 4-1BB intracellular domain, and a CD3 zeta intracellular domain (FIG. 52A; SEQ ID NO: 832). Construct C2510 includes an anti-human serine albumin sdAb, a protease cleavage site, an anti-human EGFR sdAb, a FLAG epitope, a dimerization-deficient CD8a hinge/transmembrane domain, a 4-1BB intracellular domain, and a CD3 zeta intracellular domain (FIG. 52B; SEQ ID NO: 834). Construct C2513 includes an anti-human serine albumin sdAb, a protease cleavage site 3, an anti-human EGFR sdAb, a FLAG epitope, a dimerization-deficient CD8a hinge/transmembrane domain, a 4-1BB intracellular domain, and a CD3 zeta intracellular domain (FIG. 52C; SEQ ID NO: 835). Construct C2514 includes an anti-human serine albumin sdAb, an anti-human EGFR sdAb, a FLAG epitope, a dimerization-deficient CD8a hinge/transmembrane domain, a 4-1BB intracellular domain, and a CD3 zeta intracellular domain (FIG. 52D; SEQ ID NO: 836). Construct C2448, includes an anti-human EGFR sdAb, a FLAG epitope, a dimerization-deficient CD8a hinge/transmembrane domain, a 4-1BB intracellular domain, and a CD3 zeta intracellular domain (FIG. 52E; SEQ ID NO: 833).

[0245] In Vitro Protease Site-Dependent Cell Killing Activity

[0246] In a first assay, 300,000 primary human T cells isolated from healthy donors were infected with 1 mL lentiviral supernatant made from the indicated constructs to generate anti-EGFR CAR-T cells. Twenty five thousand CAR-T cells were subsequently co-cultured under standard conditions at a 10:1 ratio (CAR-T:Target cells) with EGFR-expressing cancer cells that stably express luciferase for 72 hours. Luciferase activity is determined as a proxy for cancer cell viability and normalized to the control CAR-T cells that do not contain scFv.

[0247] The data demonstrated that the level of protease side-dependent cell killing activity was reduced in ProCAR constructs that lacked the dimerization activity of the CD8a transmembrane domain (FIG. 53B) compared to wild-type (FIG. 53A). The dimerization mutation reduces the amount of cell killing activity in the absence of exogenous protease (e.g., compare C2031 to C2510, or compare C2446 to C2513).

[0248] In a second assay, 300,000 primary human T cells isolated from healthy donors were infected with 1 mL lentiviral supernatant made from the indicated constructs to generate anti-EGFR CAR-T cells, which were subsequently co-cultured at ratios of 10:1, 5:1, 2.5:1, and 1:1 (CAR-T:Target cells) with EGF-expressing cancer cells that stably express luciferase for 72 hours. Luciferase activity is determined as a proxy for cancer cell viability and normalized to the control CAR-T cells that do not contain scFv.

[0249] The data demonstrates that dimerization-deficient EGFR CAR has similar killing activity compared to wild-type (FIG. 54).

### Example 39: Construction and Testing of Exemplary Multivalent Target Binding Proteins Constructs

[0250] The following ProCAR constructs were made. Construct C2483 includes an anti-human EpCAM sdAb, a FLAG epitope, a CD8 hinge/transmembrane domain, a 4-1BB intracellular domain, and a CD3 zeta intracellular domain (FIG. 55A; SEQ ID NO: 838). Construct C2790 includes an anti-human serum albumin sdAb, an anti-human EpCAM sdAb, a FLAG epitope, a CD8 hinge/transmembrane domain, a 4-1BB intracellular domain, and a CD3 zeta intracellular domain (FIG. 55B; SEQ ID NO: 839). Construct C3269 includes an anti-human serum albumin sdAb, an anti-human EpCAM sdAb, a FLAG epitope, a CD8 hinge/transmembrane domain, a 4-1BB intracellular domain, and a CD3 zeta intracellular domain (FIG. 55C; SEQ ID NO: 840). Construct C3272 includes an anti-human serum albumin sdAb, an anti-human EpCAM sdAb, a FLAG epitope, a CD8 hinge/transmembrane domain, a 4-1BB intracellular domain, and a CD3 zeta intracellular domain (FIG. 55D; SEQ ID NO: 841). Construct C3329 includes an anti-human serum albumin sdAb, a protease cleavage site 3, an anti-human EpCAM sdAb, a FLAG epitope, a CD8 hinge/transmembrane domain, a 4-1BB intracellular domain, and a CD3 zeta intracellular domain (FIG. 55E; SEQ ID NO: 843). Construct C3328 includes an anti-human serum albumin sdAb, a protease cleavage site 3, an anti-human EpCAM sdAb, a FLAG epitope, a CD8 hinge/transmembrane domain, a 4-1BB intracellular domain, and a CD3 zeta intracellular domain (FIG. 55F; SEQ ID NO: 842). Construct C2780 includes an anti-GFP sdAb, a FLAG epitope, a CD8 hinge/transmembrane domain, a 4-1BB intracellular domain, and a CD3 zeta intracellular domain (FIG. 55G; SEQ ID NO: 837).

[0251] EpCAM Mask 1 Blocks ProCAR EpCAM-Binding Activity

[0252] 300,000 primary human T cells isolated from healthy donors were infected with 1 mL lentiviral supernatant made from the indicated constructs from FIG. 55 to generate anti-EpCAM CAR-T cells, which were subsequently stained with anti-FLAG antibodies and EGFR-Fc along with the indicated secondary antibodies. The data was analyzed by flow cytometry. FIG. 57 provides histograms of EpCAM-Fc/Alexa Fluor 647 staining of CAR-T cells that have been grouped into low (FIG. 57A), medium (FIG. 57B), or high (FIG. 57C) CAR expression based on anti-FLAG staining.

[0253] This data demonstrates the efficacy of EpCAM mask 1 blocking ProCAR EpCAM-binding activity.

[0254] EpCAM Mask 2 Blocks ProCAR EpCAM-Binding Activity

[0255] 300,000 primary human T cells isolated from healthy donors were infected with 1 mL lentiviral supernatant made from the indicated constructs from FIG. 55 to generate anti-EpCAM CAR-T cells, which were subsequently stained with anti-FLAG antibodies and EGFR-Fc along with the indicated secondary antibodies. The data was analyzed by flow cytometry.

[0256] FIG. 58 provides histograms of EpCAM-Fc/Alexa Fluor 647 staining of CAR-T cells from FIG. 58 that have been grouped into low (FIG. 58A), medium (FIG. 58B), or high (FIG. 58C) CAR expression based on anti-FLAG staining that demonstrate the efficacy of EpCAM mask 2 in blocking ProCAR EpCAM-binding activity.

[0257] Masking of Anti-EpCAM sdAb H90

[0258] 300,000 primary human T cells isolated from healthy donors were infected with 1 mL lentiviral supernatant made from the indicated constructs from FIG. 55 to generate anti-EpCAM CAR-T cells, which were subsequently co-cultured with various ratios (CAR-T:Target cells) with EGFR-expressing cancer cells that stably express luciferase. Luciferase activity was read 72 hours later as a proxy for cancer cell viability and normalized to the anti-GFP control CAR-T cells, C2780.

[0259] The data provided in FIG. 59 demonstrates masking of the anti-EpCAM sdAb H90. C2843 is the “naked” CAR, i.e., no anti-ALB domain. Addition of the anti-ALB domain (C2790) has a small impact on cell killing activity. Addition of a mask to the CC′ non-CDR loop of the anti-ALB domain has a large impact on cell killing activity due to specific blocking of EpCAM binding.

[0260] Steric Blocking by HSA of Anti-EpCAM sdAb H90

[0261] 300,000 primary human T cells isolated from healthy donors were infected with 1 mL lentiviral supernatant made from the indicated constructs from FIG. 55 to generate anti-EpCAM CAR-T cells, which were subsequently co-cultured at various ratios (CAR-T:Target cells) with EGFR-expressing cancer cells that stably express luciferase in the presence or absence of human serum albumin (HSA). Luciferase activity was read 72 hours later as a proxy for cancer cell viability and normalized to the anti-GFP control CAR-T cells, C2780.

[0262] The data provided in FIG. 56 demonstrate steric blocking by HSA of the anti-EpCAM sdAb H90.

### Example 40: EpCAM ProCAR Protease Site-Dependent Cell Killing

[0263] 300,000 primary human T cells isolated from healthy donors were infected with 1 mL lentiviral supernatant made from the indicated constructs from FIG. 21 to generate anti-EpCAM CAR-T cells, which were subsequently co-cultured at various ratios (CAR-T:Target cells) with EGFR-expressing cancer cells that stably express luciferase. Luciferase activity was read 72 hours later as a proxy for cancer cell viability and normalized to the anti-GFP control CAR-T cells, C2780

[0264] FIG. 60 demonstrates protease site-dependent cell killing activity of CAR-T cells expressing a masked EpCAM ProCAR.

### Example 41: Protease Activation of EpCAM Mask 1 ProCAR Antigen Binding Activity

[0265] 300,000 primary human T cells isolated from healthy donors were infected with 1 mL lentiviral supernatant made from the indicated constructs from FIG. 21 to generate anti-EpCAM CAR-T cells, which were subsequently washed in PBS, and then treated for 1 hr at room temp with either PBS or PBS containing 400 nM recombinant uPA protease and then stained with anti-FLAG antibodies and EpCAM-Fc along with the anti-mouse BV421 and anti-human Fc Alexa Fluor 647 secondary antibodies and analyzed by flow cytometry.

[0266] Histograms of EpCAM-Fc staining of CAR-T cells that have been grouped into low (FIG. 61A), medium (FIG. 61B), or high (FIG. 61C) CAR expression based on anti-FLAG staining. These results demonstrate protease activation of EpCAM Mask 1 ProCAR antigen binding activity.

### Example 42: Protease Activation of EpCAM Mask 2 ProCAR Antigen Binding Activity

[0267] 300,000 primary human T cells isolated from healthy donors were infected with 1 mL lentiviral supernatant made from the indicated constructs from FIG. 55 to generate anti-EpCAM CAR-T cells, which were subsequently washed in PBS, and then treated for 1 hr at room temp with either PBS or PBS containing 400 nM recombinant uPA protease and then stained with anti-FLAG antibodies and EpCAM-Fc along with the anti-mouse BV421 and anti-human Fc Alexa Fluor 647 secondary antibodies and analyzed by flow cytometry.

[0268] Histograms of EpCAM-Fc staining of CAR-T cells that have been grouped into low (FIG. 62A), medium (FIG. 62B), or high (FIG. 62C) CAR expression based on anti-FLAG staining. These results demonstrate protease activation of EpCAM Mask 2 ProCAR antigen binding activity.

### Example 43: Demonstration of Improved Tolerability in Mouse, Conferred by an Exemplary EpCAM Targeting ProTriTAC Molecule

[0269] In this study, the tolerability of an exemplary EpCAM targeting ProTriTAC molecule was assessed. Seven weeks old NSG female tumor free mice were intraperitoneally injected with 2×10⁷ expanded human T cells at the commencement of the study, i.e., at day 0. On day 2, treatment was started by dividing the mice into various groups and administering to them varying concentrations of the exemplary EpCAM targeting ProTriTAC molecule, containing the linker sequence L040, an EpCAMR targeting TriTAC molecule, an EpCAM targeting ProTriTAC molecule containing a non-cleavable linker (EpCAM ProTriTAC (NCLV), and a GFP TriTAC molecule as a control. The molecules were administered once daily for 10 days, at the following dosages: 0.03 mg/kg, 0.1 mg/kg, 0.3 mg/kg, and 1 mg/kg. Starting from day 2, body weight of the animals were recorded daily.

[0270] As shown in FIGS. 63A-63C, the EpCAM targeting ProTriTAC molecule containing a non-cleavable linker (ProTriTAC (NCLV)) (SEQ ID No. 993) and a GFP TriTAC (used as a negative control) were very well tolerated in mice even at the highest dose of 1 mg/kg. The EpCAM targeted ProTriTAC molecule containing the linker sequence of L040 (SEQ ID No. 994) was well tolerated at the dosage of 1 mg/kg, whereas the EpCAM targeted TriTAC (SEQ ID No. 992) was well tolerated 0.1 mg/kg. It was thus observed that the EpCAM targeting ProTriTAC containing the L040 linker sequence conferred at least about 10 times improved tolerability, in mouse, compared to the EpCAM targeting TriTAC.

SEQUENCE TABLE

| DESCRIPTION | SEQUENCE |
|---|---|
| PSMA Prodrug C1872 | EVQLVESGGGLVQPGNSLRLSCAASGFTFSKFGMSWVRQGGGGGLDGNEE |
| (SEQ ID NO: 43) | PGGLEWVSSISGSGRDTLYADSVKGRFTISRDNAKTTLYLQMNSLRPEDTAV |
| | YYCTIGGSLSVSSQGTLVTVSSGGGGKPLGLQARVVGGGGT |
| | QTVVTQEPSLTVSPGGTVTLTCASSTGAVTSGNYPNWVQQKPGQAPRGLIG |
| | GTKFLVPGTPARFSGSLLGGKAALTLSGVQPEDEAEYYCTLWYSNRWVFGG |
| | GTKLTVLGGGGSGGGGSGGGGSEVQLVESGGGLVQPGGSLKLSCAASGFTF |
| | NKYAINWVRQAPGKGLEWVARIRSKYNNYATYYADQVKDRFTISRDDSKNT |
| | AYLQMNNLKTEDTAVYYCVRHANFGNSYISYWAYWGQGTLVTVSSGGGGS |
| | GGGSEVQLVESGGGLVQPGGSLTLSCAASRFMISEYHMHWVRQAPGKGLE |
| | WVSTINPAGTTDYAESVKGRFTISRDNAKNTLYLQMNSLKPEDTAVYYCDSY |
| | GYRGQGTQVTVSSHHHHHH |
| PSMA Non-cleavable | EVQLVESGGGLVQPGNSLRLSCAASGFTFSKFGMSWVRQGGGGGLDGNE |
| Prodrug C1873 | EPGGLEWVSSISGSGRDTLYADSVKGRFTISRDNAKTTLYLQMNSLRPEDTA |
| (SEQ ID NO: 44) | VYYCTIGGSLSVSSQGTLVTVSSGGGGSGGGGSGGVVGGGGT |
| | QTVVTQEPSLIVSPGGTVTLTCASSTGAVTSGNYPNWVQQKPGQAPRGLIG |
| | GTKFLVPGTPARFSGSLLGGKAALTLSGVQPEDEAEYYCTLWYSNRWVFGG |
| | GTKLTVLGGGGSGGGGSGGGGSEVQLVESGGGLVQPGGSLKLSCAASGFTF |
| | NKYAINWVRQAPGKGLEWVARIRSKYNNYATYYADQVKDRFTISRDDSKNT |
| | AYLQMNNLKTEDTAVYYCVRHANFGNSYISYWAYWGQGTLVTVSSGGGGS |
| | GGGSEVQLVESGGGLVQPGGSLTLSCAASRFMISEYHMHWVRQAPGKGLE |
| | WVSTINPAGTTDYAESVKGRFTISRDNAKNTLYLQMNSLKPEDTAVYYCDSY |
| | GYRGQGTQVTVSSHHHHHH |
| PSMA Active Drug | VVGGGGTQTVVTQEPSLTVSPGGTVTLTCASSTGAVTSGNYPNWVQQKPG |
| C1875 (SEQ ID NO: 45) | QAPRGLIGGTKFLVPGTPARFSGSLLGGKAALTLSGVQPEDEAEYYCTLWYS |
| | NRWVFGGGTKLTVLGGGGSGGGGSGGGGSEVQLVESGGGLVQPGGSLKL |
| | SCAASGFTFNKYAINWVRQAPGKGLEWVARIRSKYNNYATYYADQVKDRFT |
| | ISRDDSKNTAYLQMNNLKTEDTAVYYCVRHANFGNSYISYWAYWGQGTLV |
| | TVSSGGGGSGGGSEVQLVESGGGLVQPGGSLTLSCAASRFMISEYHMHWV |
| | RQAPGKGLEWVSTINPAGTTDYAESVKGRFTISRDNAKNTLYLQMNSLKPE |
| | DTAVYYCDSYGYRGQGTQVTVSSHHHHHH |
| EGFR (G8) Prodrug | EVQLVESGGGLVQPGNSLRLSCAASGFTFSKFGMSWVRQGGGGGLDGNE |
| C1486 (SEQ ID NO: 46) | EPGGLEWVSSISGSGRDTLYADSVKGRFTISRDNAKTTLYLQMNSLRPEDTA |
| | VYYCTIGGSLSVSSQGTLVTVSSGGGGKPLGLQARVVGGGGT |
| | QTVVTQEPSLTVSPGGTVTLTCASSTGAVTSGNYPNWVQQKPGQAPRGLIG |
| | GTKFLVPGTPARFSGSLLGGKAALTLSGVQPEDEAEYYCTLWYSNRWVFGG |
| | GTKLTVLGGGGSGGGGSGGGGSEVQLVESGGGLVQPGGSLKLSCAASGFTF |
| | NKYAINWVRQAPGKGLEWVARIRSKYNNYATYYADQVKDRFTISRDDSKNT |
| | AYLQMNNLKTEDTAVYYCVRHANFGNSYISYWAYWGQGTLVTVSSGGGGS |
| | GGGSEVQLVESGGGLVQPGGSLTLSCAASGRTFSSYAMGWFRQAPGKERE |
| | FVVAINWASGSTYYADSVKGRFTISRDNSKNTLYLQMNSLRAEDTAVYYCAA |
| | GYQINSGNYNFKDYEYDYWGQGTLVTVSSHHHHHH |
| EGFR (G8) Non- | EVQLVESGGGLVQPGNSLRLSCAASGFTFSKFGMSWVRQGGGGGLDGNE |
| cleavable Prodrug | EPGGLEWVSSISGSGRDTLYADSVKGRFTISRDNAKTTLYLQMNSLRPEDTA |
| C1756 (SEQ ID NO: 47) | VYYCTIGGSLSVSSQGTLVTVSSGGGGSGGGGSGGVVGGGGT |
| | QTVVTQEPSLTVSPGGTVTLTCASSTGAVTSGNYPNWVQQKPGQAPRGLIG |
| | GTKFLVPGTPARFSGSLLGGKAALTLSGVQPEDEAEYYCTLWYSNRWVFGG |
| | GTKLTVLGGGGSGGGGSGGGGSEVQLVESGGGLVQPGGSLKLSCAASGFTF |
| | NKYAINWVRQAPGKGLEWVARIRSKYNNYATYYADQVKDRFTISRDDSKNT |
| | AYLQMNNLKTEDTAVYYCVRHANFGNSYISYWAYWGQGTLVTVSSGGGGS |
| | GGGSEVQLVESGGGLVQPGGSLTLSCAASGRTFSSYAMGWFRQAPGKERE |
| | FVVAINWASGSTYYADSVKGRFTISRDNSKNTLYLQMNSLRAEDTAVYYCAA |
| | GYQINSGNYNFKDYEYDYWGQGTLVTVSSHHHHHH |
| EGFR (G8) Active Drug | VVGGGGTQTVVTQEPSLTVSPGGTVTLTCASSTGAVTSGNYPNWVQQKPG |
| C1300 (SEQ ID NO: 48) | QAPRGLIGGTKFLVPGTPARFSGSLLGGKAALTLSGVQPEDEAEYYCTLWYS |
| | NRWVFGGGTKLTVLGGGGSGGGGSGGGGSEVQLVESGGGLVQPGGSLKL |
| | SCAASGFTFNKYAINWVRQAPGKGLEWVARIRSKYNNYATYYADQVKDRFT |
| | ISRDDSKNTAYLQMNNLKTEDTAVYYCVRHANFGNSYISYWAYWGQGTLV |
| | TVSSGGGGSGGGSEVQLVESGGGLVQPGGSLTLSCAASGRTFSSYAMGWF |
| | RQAPGKEREFVVAINWASGSTYYADSVKGRFTISRDNSKNTLYLQMNSLRAE |
| | DTAVYYCAAGYQINSGNYNFKDYEYDYWGQGTLVTVSSHHHHHH |
| GFP TriTAC C646 | QVQLVESGGALVQPGGSLRLSCAASGFPVNRYSMRWYRQAPGKEREWVA |
| (SEQ ID NO: 49) | GMSSAGDRSSYEDSVKGRFTISRDDARNTVYLQMNSLKPEDTAVYYCNVNV |
| | GFEYWGQGTQVTVSSGGGGSGGGSEVQLVESGGGLVQPGNSLRLSCAASG |
| | FTFSKFGMSWVRQAPGKGLEWVSSISGSGRDTLYADSVKGRFTISRDNAKT |
| | TLYLQMNSLRPEDTAVYYCTIGGSLSVSSQGTLVTVSSGGGGSGGGSEVQLV |
| | ESGGGLVQPGGSLKLSCAASGFTFNKYAINWVRQAPGKGLEWVARIRSKYN |
| | NYATYYADQVKDRFTISRDDSKNTAYLQMNNLKTEDTAVYYCVRHANFGNS |
| | YISYWAYWGQGTLVTVSSGGGGSGGGGSGGGGSQTVVTQEPSLTVSPGGT |
| | VTLTCASSTGAVTSGNYPNWVQQKPGQAPRGLIGGTKFLVPGTPARFSGSL |
| | LGGKAALTLSGVQPEDEAEYYCTLWYSNRWVFGGGTKLTVLHHHHHH |
| Exemplary masking | GGGGGLDGNEEPGG |
| sequence (SEQ ID NO: | |
| 50) | |
| Exemplary non- | GGGGSGGGGSGGVVGGGGT |
| cleavable linker | |
| sequence comprising | |
| protease cleavage site | |
| (SEQ ID NO: 51) | |
| PSMA Non-masked Non- | EVQLVESGGGLVQPGNSLRLSCAASGFTFSKFGMSWVRQAPGKGLEWVSSI |
| cleavable Prodrug | SGSGRDTLYADSVKGRFTISRDNAKTTLYLQMNSLRPEDTAVYYCTIGGSLSV |
| C1874 | SSQGTLVTVSSGGGGSGGGGSGGVVGGGGTQTVVTQEPSLTVSPGGTVTL |
| (SEQ ID NO: 52) | TCASSTGAVTSGNYPNWVQQKPGQAPRGLIGGTKFLVPGTPARFSGSLLGG |
| | KAALTLSGVQPEDEAEYYCTLWYSNRWVFGGGTKLTVLGGGGSGGGGSGG |
| | GGSEVQLVESGGGLVQPGGSLKLSCAASGFTFNKYAINWVRQAPGKGLEW |
| | VARIRSKYNNYATYYADQVKDRFTISRDDSKNTAYLQMNNLKTEDTAVYYCV |
| | RHANFGNSYISYWAYWGQGTLVTVSSGGGGSGGGSEVQLVESGGGLVQP |
| | GGSLTLSCAASRFMISEYHMHWVRQAPGKGLEWVSTINPAGTTDYAESVK |
| | GRFTISRDNAKNTLYLQMNSLKPEDTAVYYCDSYGYRGQGTQVIVSSHHHH |
| | HH |
| Exemplary cleavable | GGGGKPLGLQARVVGGGGT |
| linker | |
| (SEQ ID NO: 53) | |
| Exemplary anti-albumin | EVQLVESGGGLVQPGNSLRLSCAASGFTFSKFGMSWVRQGGGGGLDGNE |
| sdAb | EPGGLEWVSSISGSGRDTLYADSVKGRFTISRDNAKTTLYLQMNSLRPEDTA |
| (SEQ ID NO: 54) | VYYCTIGGSLSVSSQGTLVTVSSGGGGKPLGLQARVVGGGGT |
| Exemplary anti-target | EVQLVESGGGLVQPGGSLTLSCAASGRTFSSYAMGWFRQAPGKEREFVVAI |
| (anti-EGFR) sdAb | NWASGSTYYADSVKGRFTISRDNSKNTLYLQMNSLRAEDTAVYYCAAGYQI |
| (SEQ ID NO: 55) | NSGNYNFKDYEYDYWGQGTLVTVSS |
| Exemplary anti-CD3 scFv | QTVVTQEPSLTVSPGGTVTLTCASSTGAVTSGNYPNWVQQKPGQAPRGLIG |
| (SEQ ID NO: 56) | GTKFLVPGTPARFSGSLLGGKAALTLSGVQPEDEAEYYCTLWYSNRWVFGG |
| | GTKLTVLGGGGSGGGGSGGGGSEVQLVESGGGLVQPGGSLKLSCAASGFTF |
| | NKYAINWVRQAPGKGLEWVARIRSKYNNYATYYADQVKDRFTISRDDSKNT |
| | AYLQMNNLKTEDTAVYYCVRHANFGNSYISYWAYWGQGTLVTVSS |
| Exemplary anti-target | EVQLVESGGGLVQPGGSLTLSCAASRFMISEYHMHWVRQAPGKGLEWVST |
| (anti-PSMA) sdAb | INPAGTTDYAESVKGRFTISRDNAKNTLYLQMNSLKPEDTAVYYCDSYGYRG |
| (SEQ ID NO: 57) | QGTQVTVSS |
| Exemplary anti-target | EVQLVESGGGLVQPGGSLRLSCAASRFMISEYHMHWVRQAPGKGLEWVS |
| (anti-PSMA) sdAb | DINPAGTTDYAESVKGRFTISRDNAKNTLYLQMNSLRAEDTAVYYCDSYGYR |
| (SEQ ID NO: 63) | GQGTLVTVSS |
| Exemplary anti-target | EVQLVESGGGLVQPGGSLRLSCAASRFMISEYHMHWVRQAPGKGLEWVST |
| (anti-PSMA) sdAb | INPAGTTDYAESVKGRFTISRDNAKNTLYLQMNSLRAEDTAVYYCDSYGYRG |
| (SEQ ID NO: 64) | QGTLVTVSS |
| Exemplary anti-target | EVQLVESGGGLVQPGGSLRLSCAASRFMISEYSMHWVRQAPGKGLEWVSTI |
| (anti-PSMA) sdAb | NPAKTTDYAESVKGRFTISRDNAKNTLYLQMNSLRAEDTAVYYCDSYGYRG |
| (SEQ ID NO: 65) | QGTLVTVSS |
| Exemplary anti-target | EVQLVESGGGLVQPGGSLRLSCAASRFMISPYSMHWVRQAPGKGLEWVST |
| (anti-PSMA) sdAb | INPAGTTDYAESVKGRFTISRDNAKNTLYLQMNSLRAEDTAVYYCDGYGYRG |
| (SEQ ID NO: 66) | QGTLVTVSS |
| Exemplary anti-target | EVQLVESGGGLVQPGGSLRLSCAASRFMISEYSMHWVRQAPGKGLEWVSTI |
| (anti-PSMA) sdAb | NPAGQTDYAESVKGRFTISRDNAKNTLYLQMNSLRAEDTAVYYCDGYGYRG |
| (SEQ ID NO: 67) | QGTLVTVSS |
| Exemplary anti-target | EVQLVESGGGLVQPGGSLRLSCAASRFMISEYSMHWVRQAPGKGLEWVSTI |
| (anti-PSMA) sdAb | NPAGTTDYAEYVKGRFTISRDNAKNTLYLQMNSLRAEDTAVYYCDGYGYRG |
| (SEQ ID NO: 68) | QGTLVTVSS |
| Exemplary anti-target | EVQLVESGGGLVQPGGSLRLSCAASRFMISEYHMHWVRQAPGKGLEWVS |
| (anti-PSMA) sdAb | DINPAKTTDYAESVKGRFTISRDNAKNTLYLQMNSLRAEDTAVYYCDSYGYR |
| (SEQ ID NO: 69) | GQGTLVTVSS |
| Exemplary anti-target | EVQLVESGGGLVQPGGSLRLSCAASRFMISPYHMHWVRQAPGKGLEWVS |
| (anti-PSMA) sdAb | DINPAGTTDYAESVKGRFTISRDNAKNTLYLQMNSLRAEDTAVYYCDSYGYR |
| (SEQ ID NO: 70) | GQGTLVTVSS |
| Exemplary anti-target | EVQLVESGGGLVQPGGSLRLSCAASRFMISEYHMHWVRQAPGKGLEWVS |
| (anti-PSMA) sdAb | DINPAGQTDYAESVKGRFTISRDNAKNTLYLQMNSLRAEDTAVYYCDSYGYR |
| (SEQ ID NO: 71) | GQGTLVTVSS |
| Exemplary anti-target | EVQLVESGGGLVQPGGSLRLSCAASRFMISEYHMHWVRQAPGKGLEWVS |
| (anti-PSMA) sdAb | DINPAGTTDYAEYVKGRFTISRDNAKNTLYLQMNSLRAEDTAVYYCDSYGYR |
| (SEQ ID NO: 72) | GQGTLVTVSS |
| Exemplary anti-target | EVQLVESGGGLVQPGGSLTLSCAASRFMISEYHMHWVRQAPGKGLEWVSD |
| (anti-PSMA) sdAb | INPAGTTDYAESVKGRFTISRDNAKNTLYLQMNSLKPEDTAVYYCDSYGYRG |
| (SEQ ID NO: 73) | QGTQVTVSS |
| Exemplary anti-CD3 scFv | EVQLVESGGGLVQPGGSLKLSCAASGFTFNKYAINWVRQAPGKGLEWVARI |
| (SEQ ID NO: 74) | RSKYNNYATYYADQVKDRFTISRDDSKNTAYLQMNNLKTEDTAVYYCVRHA |
| | NFGNSYISYWAYWGQGTLVTVSSGGGGSGGGGSGGGGSQTVVTQEPSLT |
| | VSPGGTVTLTCASSTGAVTSGNYPNWVQQKPGQAPRGLIGGTKFLVPGTPA |
| | RFSGSLLGGKAALTLSGVQPEDEAEYYCTLWYSNRWVFGGGTKLTVL |
| Exemplary anti-CD3 scFv | EVQLVESGGGLVQPGGSLKLSCAASGFEFNKYAMNWVRQAPGKGLEWVA |
| (SEQ ID NO: 75) | RIRSKYNKYATYYADSVKDRFTISRDDSKNTAYLQMNNLKTEDTAVYYCVRH |
| | GNFGNSYISYWAYWGQGTLVTVSSGGGGSGGGGSGGGGSQTVVTQEPSL |
| | TVSPGGTVTLTCGSSFGAVTSGNYPNWVQQKPGQAPRGLIGGTKFLAPGTP |
| | ARFSGSLLGGKAALTLSGVQPEDEAEYYCVLWYDNRWVFGGGTKLTVL |
| Exemplary anti-CD3 scFv | EVQLVESGGGLVQPGGSLKLSCAASGFTFNKYAMNWVRQAPGKGLEWVA |
| (SEQ ID NO: 76) | RIRSKYNNYATYYADSVKDRFTISRDDSKNTAYLQMNNLKTEDTAVYYCVRH |
| | GNFGNSHISYWAYWGQGTLVTVSSGGGGSGGGGSGGGGSQTVVTQEPSL |
| | TVSPGGTVTLTCGSSTGYVTSGNYPNWVQQKPGQAPRGLIGGTSFLAPGTP |
| | ARFSGSLLGGKAALTLSGVQPEDEAEYYCVLWYSNRWIFGGGTKLTVL |
| Exemplary anti-CD3 scFv | EVQLVESGGGLVQPGGSLKLSCAASGFMFNKYAMNWVRQAPGKGLEWV |
| (SEQ ID NO: 77) | ARIRSKSNNYATYYADSVKDRFTISRDDSKNTAYLQMNNLKTEDTAVYYCVR |
| | HGNFGNSYISYWATVVGQGTLVTVSSGGGGSGGGGSGGGGSQTVVTQEPS |
| | LTVSPGGTVTLTCGSSFGAVTSGNYPNWVQQKPGQAPRGLIGGTKLLAPGT |
| | PARFSGSLLGGKAALTLSGVQPEDEAEYYCVLWYSNSWVFGGGTKLTVL |
| Exemplary anti-CD3 scFv | EVQLVESGGGLVQPGGSLKLSCAASGFTFNTYAMNWVRQAPGKGLEWVA |
| (SEQ ID NO: 78) | RIRSKYNNYATYYKDSVKDRFTISRDDSKNTAYLQMNNLKTEDTAVYYCVRH |
| | GNFGNSPISYWAYWGQGTLVTVSSGGGGSGGGGSGGGGSQTVVTQEPSL |
| | TVSPGGTVTLTCGSSTGAVVSGNYPNWVQQKPGQAPRGLIGGTEFLAPGTP |
| | ARFSGSLLGGKAALTLSGVQPEDEAEYYCVLWYSNRWVFGGGTKLTVL |
| Exemplary anti-CD3 scFv | EVQLVESGGGLVQPGGSLKLSCAASGFTYNKYAMNWVRQAPGKGLEWVA |
| (SEQ ID NO: 79) | RIRSKYNNYATYYADEVKDRFTISRDDSKNTAYLQMNNLKTEDTAVYYCVRH |
| | GNFGNSPISYWAYWGQGTLVTVSSGGGGSGGGGSGGGGSQTVVTQEPSL |
| | TVSPGGTVTLTCGSSKGAVTSGNYPNWVQQKPGQAPRGLIGGTKELAPGTP |
| | ARFSGSLLGGKAALTLSGVQPEDEAEYYCTLWYSNRWVFGGGTKLTVL |
| Exemplary anti-CD3 scFv | EVQLVESGGGLVQPGGSLKLSCAASGNTFNKYAMNWVRQAPGKGLEWVA |
| (SEQ ID NO: 80) | RIRSKYNNYETYYADSVKDRFTISRDDSKNTAYLQMNNLKTEDTAVYYCVRH |
| | TNFGNSYISYWAYWGQGTLVTVSSGGGGSGGGGSGGGGSQTVVTQEPSLT |
| | VSPGGTVTLTCGSSTGAVTSGYYPNWVQQKPGQAPRGLIGGTYFLAPGTPA |
| | RFSGSLLGGKAALTLSGVQPEDEAEYYCVLWYSNRWVFGGGTKLTVL |
| Exemplary anti-CD3 scFv | EVQLVESGGGLVQPGGSLKLSCAASGFTFNNYAMNWVRQAPGKGLEWVA |
| (SEQ ID NO: 81) | RIRSKYNNYATYYADAVKDRFTISRDDSKNTAYLQMNNLKTEDTAVYYCVRH |
| | GNFGNSQISYWAYWGQGTLVTVSSGGGGSGGGGSGGGGSQTVVTQEPSL |
| | TVSPGGTVTLTCGSSTGAVTDGNYPNWVQQKPGQAPRGLIGGIKFLAPGTP |
| | ARFSGSLLGGKAALTLSGVQPEDEAEYYCVLWYSNRWVFGGGTKLTVL |
| Exemplary anti-CD3 scFv | EVQLVESGGGLVQPGGSLKLSCAASGFTFNKYAVNWVRQAPGKGLEWVAR |
| (SEQ ID NO: 82) | IRSKYNNYATYYADSVKDRFTISRDDSKNTAYLQMNNLKTEDTAVYYCVRHG |
| | NFGNSYISYWAYWGQGTLVTVSSGGGGSGGGGSGGGGSQTVVTQEPSLT |
| | VSPGGTVTLTCGESTGAVTSGNYPNWVQQKPGQAPRGLIGGTKILAPGTPA |
| | RFSGSLLGGKAALTLSGVQPEDEAEYYCVLWYSNRWVFGGGTKLTVL |
| Exemplary anti-CD3 scFv | EVQLVESGGGLVQPGGSLKLSCAASGFTFNKYPMNWVRQAPGKGLEWVA |
| (SEQ ID NO: 83) | RIRSKYNNYATYYADSVKDRFTISRDDSKNTAYLQMNNLKNEDTAVYYCVRH |
| | GNFNNSYISYWAYWGQGTLVTVSSGGGGSGGGGSGGGGSQTVVTQEPSL |
| | TVSPGGTVTLTCGSSTGAVTKGNYPNWVQQKPGQAPRGLIGGTKMLAPGT |
| | PARFSGSLLGGKAALTLSGVQPEDEAEYYCALWYSNRWVFGGGTKLTVL |
| Exemplary anti-CD3 scFv | EVQLVESGGGLVQPGGSLKLSCAASGFTFNGYAMNWVRQAPGKGLEWVA |
| (SEQ ID NO: 84) | RIRSKYNNYATYYADEVKDRFTISRDDSKNTAYLQMNNLKTEDTAVYYCVRH |
| | GNFGNSPISYWAYWGQGTLVTVSSGGGGSGGGGSGGGGSQTVVTQEPSL |
| | TVSPGGTVTLTCGSSTGAVVSGNYPNWVQQKPGQAPRGLIGGTEFLAPGTP |
| | ARFSGSLLGGKAALTLSGVQPEDEAEYYCVLWYSNRWVFGGGTKLTVL |
| Exemplary anti-CD3 scFv | EVQLVESGGGLVQPGGSLKLSCAASGNTFNKYAMNWVRQAPGKGLEWVA |
| (SEQ ID NO: 85) | RIRSKYNNYATYYADSVKDRFTISRDDSKNTAYLQMNNLKTEDTAVYYCVRH |
| | GNFGDSYISYWAYWGQGTLVTVSSGGGGSGGGGSGGGGSQTVVTQEPSL |
| | TVSPGGTVTLTCGSSTGAVTHGNYPNWVQQKPGQAPRGLIGGTKVLAPGT |
| | PARFSGSLLGGKAALTLSGVQPEDEAEYYCVLWYSNRWVFGGGTKLTVL |
| Exemplary anti-CD3 scFv | EVQLVESGGGLVQPGGSLKLSCAASGFTFNNYAMNWVRQAPGKGLEWVA |
| (SEQ ID NO: 86) | RIRSGYNNYATYYADSVKDRFTISRDDSKNTAYLQMNNLKTEDTAVYYCVRH |
| | GNFGNSYISYWAYWGQGTLVTVSSGGGGSGGGGSGGGGSQTVVTQEPSL |
| | TVSPGGTVTLTCGSYTGAVTSGNYPNWVQQKPGQAPRGLIGGTKFNAPGT |
| | PARFSGSLLGGKAALTLSGVQPEDEAEYYCVLWYANRWVFGGGTKLTVL |
| Exemplary anti-CD3 scFv | EVQLVESGGGLVQPGGSLKLSCAASGFEFNKYAMNWVRQAPGKGLEWVA |
| (SEQ ID NO: 87) | RIRSKYNNYETYYADSVKDRFTISRDDSKNTAYLQMNNLKTEDTAVYYCVRH |
| | GNFGNSLISYWAYWGQGTLVTVSSGGGGSGGGGSGGGGSQTVVTQEPSL |
| | TVSPGGTVTLTCGSSSGAVTSGNYPNWVQQKPGQAPRGLIGGTKFGAPGT |
| | PARFSGSLLGGKAALTLSGVQPEDEAEYYCVLWYSNRWVFGGGTKLTVL |
| Exemplary anti-CD3 scFv | EVQLVESGGGLVQPGGSLKLSCAASGFTFNKYAMNWVRQAPGKGLEWVA |
| (SEQ ID NO: 88) | RIRSKYNNYATYYADSVKDRFTISRDDSKNTAYLQMNNLKTEDTAVYYCVRH |
| | GNFGNSYISYWAYWGQGTLVTVSSGGGGSGGGGSGGGGSQTVVTQEPSL |
| | TVSPGGTVTLTCGSSTGAVTSGNYPNWVQQKPGQAPRGLIGGTKFLAPGTP |
| | ARFSGSLLGGKAALTLSGVQPEDEAEYYCVLWYSNRWVFGGGTKLTVL |
| Exemplary anti-CD3 scFv | EVQLVESGGGLVQPGGSLKLSCAASGFTFNKYALNWVRQAPGKGLEWVARI |
| (SEQ ID NO: 89) | RSKYNNYATEYADSVKDRFTISRDDSKNTAYLQMNNLKTEDTAVYYCVRHG |
| | NFGNSPISYWAYWGQGTLVTVSSGGGGSGGGGSGGGGSQTVVTQEPSLT |
| | VSPGGTVTLTCGSSTGAVTSGNYPNWVQQKPGQAPRGLIGGTNFLAPGTP |
| | ERFSGSLLGGKAALTLSGVQPEDEAEYYCVLWYSNRWAFGGGTKLTVL |
| Exemplary anti-CD3 scFv | EVQLVESGGGLVQPGGSLKLSCAASGFTFNEYAMNWVRQAPGKGLEWVA |
| (SEQ ID NO: 90) | RIRSKYNNYATYYADDVKDRFTISRDDSKNTAYLQMNNLKTEDTAVYYCVRH |
| | GNFGNSGISYWAYWGQGTLVTVSSGGGGSGGGGSGGGGSQTVVTQEPSL |
| | TVSPGGTVTLTCGSSTGAVTVGNYPNWVQQKPGQAPRGLIGGTEFLAPGTP |
| | ARFSGSLLGGKAALTLSGVQPEDEAEYYCVLWYSNRWVFGGGTKLTVL |
| Exemplary anti-target | EVQLVESGGGLVQPGRSLTLSCAASTNIFSISPMGWYRQAPGKQRELVAAIH |
| (BCMA) | GFSTLYADSVKGRFTISRDNAKNSIYLQMNSLRPEDTALYYCNKVPWGDYHP |
| (SEQ ID NO: 91) | RNVYWGQGTQVTVSS |
| Exemplary anti-target | EVQLVESGGGLVQPGRSLTLSCAASTDIFSISPMGWYRQAPGKQRELVAAIH |
| (BCMA) | GGSTLYADSVKGRFTISRDNAKNSIYLQMNSLRPEDTALYYCNKVPWGDYH |
| (SEQ ID NO: 92) | PRNVAWGQGTQVTVSS |
| Exemplary anti-target | EVQLVESGGGLVQPGRSLTLSCAASTNDFSISPMGWYRQAPGKQRELVAAI |
| (BCMA) | HGGSTLYADSVKGRFTISRDNAKNSIYLQMNSLRPEDTALYYCNKVPWGDY |
| (SEQ ID NO: 93) | HPRNVAWGQGTQVTVSS |
| Exemplary anti-target | EVQLVESGGGLVQPGRSLTLSCAASTNIFSKSPMGWYRQAPGKQRELVAAI |
| (BCMA) | HGKSTLYADSVKGRFTISRDNAKNSIYLQMNSLRPEDTALYYCNKVPWGDY |
| (SEQ ID NO: 94) | HPRNVVWGQGTQVTVSS |
| Exemplary anti-target | EVQLVESGGGLVQPGRSLTLSCAASTNDESISPMGWYRQAPGKQRELVAAI |
| (BCMA) | HGKSTLYADSVKGRFTISRDNAKNSIYLQMNSLRPEDTALYYCNKVPWGDY |
| (SEQ ID NO: 95) | HPRNVKWGQGTQVTVSS |
| Exemplary anti-target | EVQLVESGGGLVQPGRSLTLSCAASTNQFSISPMGWYRQAPGKQRELVAAI |
| (BCMA) | HGKSTLYADSVKGRFTISRDNAKNSIYLQMNSLRPEDTALYYCNKVPWGDY |
| (SEQ ID NO: 96) | HPRNVVWGQGTQVTVSS |
| Exemplary anti-target | EVQLVESGGGLVQPGRSLTLSCAASTNIFSSSPMGWYRQAPGKQRELVAAI |
| (BCMA) | NGFSTLYADSVKGRFTISRDNAKNSIYLQMNSLRPEDTALYYCNKVPWGDYH |
| (SEQ ID NO: 97) | PRNVHWGQGTQVTVSS |
| Exemplary anti-target | EVQLVESGGGLVQPGRSLTLSCAASTNIFSSSPMGWYRQAPGKQRELVAAI |
| (BCMA) | HGFSTLYADSVKGRFTISRDNAKNSIYLQMNSLRPEDTALYYCNKVPWGDYH |
| (SEQ ID NO: 98) | PRNVYWGQGTQVTVSS |
| Exemplary anti-target | EVQLVESGGGLVQPGRSLTLSCAASTNIFSTSPMGWYRQAPGKQRELVAAI |
| (BCMA) | HGFQTLYADSVKGRFTISRDNAKNSIYLQMNSLRPEDTALYYCNKVPWGDY |
| (SEQ ID NO: 99) | HPRNVVWGQGTQVTVSS |
| Exemplary anti-target | EVQLVESGGGLVQPGRSLTLSCAASTNIFSRSPMGWYRQAPGKQRELVAAI |
| (BCMA) | HGFETLYADSVKGRFTISRDNAKNSIYLQMNSLRPEDTALYYCNKVPWGDYH |
| (SEQ ID NO: 100) | PRNVLWGQGTQVTVSS |
| Exemplary anti-target | EVQLVESGGGLVQPGRSLTLSCAASTNIFSESPMGWYRQAPGKQRELVAAI |
| (BCMA) | HGFTTLYADSVKGRFTISRDNAKNSIYLQMNSLRPEDTALYYCNKVPWGDYH |
| (SEQ ID NO: 101) | PRNVTWGQGTQVTVSS |
| Exemplary anti-target | EVQLVESGGGLVQPGRSLTLSCAASTNIFSDSPMGWYRQAPGKQRELVAAI |
| (BCMA) | HGFSTLYADSVKGRFTISRDNAKNSIYLQMNSLRPEDTALYYCNKVPWGDYH |
| (SEQ ID NO: 102) | PRNVAWGQGTQVTVSS |
| Exemplary anti-target | EVQLVESGGGLVQPGRSLTLSCAASTNIFSNSPMGWYRQAPGKQRELVAAI |
| (BCMA) | HGGSTLYADSVKGRFTISRDNAKNSIYLQMNSLRPEDTALYYCNKVPWGDY |
| (SEQ ID NO: 103) | HPRNVHWGQGTQVTVSS |
| Exemplary anti-target | EVQLVESGGGLVQPGRSLTLSCAASTNIFSNSPMGWYRQAPGKQRELVAAI |
| (BCMA) | HGRSTLYADSVKGRFTISRDNAKNSIYLQMNSLRPEDTALYYCNKVPWGDY |
| (SEQ ID NO: 104) | HPRNVMWGQGTQVTVSS |
| Exemplary anti-target | EVQLVESGGGLVQPGRSLTLSCAASTNIFSNSPMGWYRQAPGKQRELVAAI |
| (BCMA) | HGPSTLYADSVKGRFTISRDNAKNSIYLQMNSLRPEDTALYYCNKVPWGDY |
| (SEQ ID NO: 105) | HPRNVTWGQGTQVTVSS |
| Exemplary anti-target | EVQLVESGGGLVQPGRSLTLSCAASTNIFSNSPMGWYRQAPGKQRELVAAI |
| (BCMA) | HGDSTLYADSVKGRFTISRDNAKNSIYLQMNSLRPEDTALYYCNKVPWGDY |
| (SEQ ID NO: 106) | HPRNVRWGQGTQVTVSS |
| Exemplary anti-target | EVQLVESGGGLVQPGRSLTLSCAASTNIFSRSPMGWYRQAPGKQRELVAAI |
| (BCMA) | HGDSTLYADSVKGRFTISRDNAKNSIYLQMNSLRPEDTALYYCNKVPWGDY |
| (SEQ ID NO: 107) | HPRNVTWGQGTQVTVSS |
| Exemplary anti-target | EVQLVESGGGLVQPGRSLTLSCAASTNIFSKSPMGWYRQAPGKQRELVAAI |
| (BCMA) | HGQSTLYADSVKGRFTISRDNAKNSIYLQMNSLRPEDTALYYCNKVPWGDY |
| (SEQ ID NO: 108) | HPRNVTWGQGTQVTVSS |
| Exemplary anti-target | EVQLVESGGGLVQPGRSLTLSCAASTNIFSSSPMGWYRQAPGKQRELVAAI |
| (BCMA) | HGHSTLYADSVKGRFTISRDNAKNSIYLQMNSLRPEDTALYYCNKVPWGDY |
| (SEQ ID NO: 109) | HPRNVTWGQGTQVTVSS |
| Exemplary anti-target | EVQLVESGGGLVQPGRSLTLSCAASTNIFSSSPMGWYRQAPGKQRELVAAI |
| (BCMA) | HGESTLYADSVKGRFTISRDNAKNSIYLQMNSLRPEDTALYYCNKVPWGDYH |
| (SEQ ID NO: 110) | PRKVYWGQGTQVTVSS |
| Exemplary anti-target | EVQLVESGGGLVQPGRSLTLSCAASTNIFSRSPMGWYRQAPGKQRELVAAI |
| (BCMA) | HGNSTLYADSVKGRFTISRDNAKNSIYLQMNSLRPEDTALYYCNKVPWGIYH |
| (SEQ ID NO: 111) | PRNVYWGQGTQVTVSS |
| Exemplary anti-target | EVQLVESGGGLVQPGRSLTLSCAASTNIFSESPMGWYRQAPGKQRELVAAI |
| (BCMA) | HGNSTLYADSVKGRFTISRDNAKNSIYLQMNSLRPEDTALYYCNKVPWGTY |
| (SEQ ID NO: 112) | HPRNVYWGQGTQVTVSS |
| Exemplary anti-target | EVQLVESGGGLVQPGRSLTLSCAASTNIFSVSPMGWYRQAPGKQRELVAAI |
| (BCMA) | HGNSTLYADSVKGRFTISRDNAKNSIYLQMNSLRPEDTALYYCNKVPWGKY |
| (SEQ ID NO: 113) | HPRNVYWGQGTQVTVSS |
| Exemplary anti-target | EVQLVESGGGLVQPGRSLTLSCAASTNIFSVSPMGWYRQAPGKQRELVAAI |
| (BCMA) | HGNSTLYADSVKGRFTISRDNAKNSIYLQMNSLRPEDTALYYCNKVPWGDY |
| (SEQ ID NO: 114) | HPRNVYWGQGTQVTVSS |
| Exemplary anti-target | EVQLVESGGGLVQPGRSLTLSCAASTNIFSKSPMGWYRQAPGKQRELVAAI |
| (BCMA) | HGNSTLYADSVKGRFTISRDNAKNSIYLQMNSLRPEDTALYYCNKVPWGDY |
| (SEQ ID NO: 115) | HPREVYWGQGTQVTVSS |
| Exemplary anti-target | EVQLVESGGGLVQPGRSLTLSCAASTNIFSDSPMGWYRQAPGKQRELVAAI |
| (BCMA) | HGTSTLYADSVKGRFTISRDNAKNSIYLQMNSLRPEDTALYYCNKVPWGDYH |
| (SEQ ID NO: 116) | PRNVYWGQGTQVTVSS |
| Exemplary anti-target | EVQLVESGGGLVQPGRSLTLSCAASTNIFSRSPMGWYRQAPGKQRELVAAI |
| (BCMA) | HGTSTLYADSVKGRFTISRDNAKNSIYLQMNSLRPEDTALYYCNKVPWGKYH |
| (SEQ ID NO: 117) | PRNVYWGQGTQVTVSS |
| Exemplary anti-target | EVQLVESGGGLVQPGRSLTLSCAASTNIFSHSPMGWYRQAPGKQRELVAAI |
| (BCMA) | HGTSTLYADSVKGRFTISRDNAKNSIYLQMNSLRPEDTALYYCNKVPWGRYH |
| (SEQ ID NO: 118) | PRNVYWGQGTQVTVSS |
| Exemplary anti-target | EVQLVESGGGLVQPGRSLTLSCAASTNIFSTSPMGWYRQAPGKQRELVAAI |
| (BCMA) | HGTSTLYADSVKGRFTISRDNAKNSIYLQMNSLRPEDTALYYCNKVPWGDYH |
| (SEQ ID NO: 119) | PGNVYWGQGTQVTVSS |
| Exemplary anti-target | EVQLVESGGGLVQPGRSLTLSCAASTNIFSTSPMGWYRQAPGKQRELVAAI |
| (BCMA) | HGTSTLYADSVKGRFTISRDNAKNSIYLQMNSLRPEDTALYYCNKVPWGDYH |
| (SEQ ID NO: 120) | PRNVQWGQGTQVTVSS |
| Exemplary anti-target | EVQLVESGGGLVQPGRSLTLSCAASTNIFSLSPMGWYRQAPGKQRELVAAI |
| (BCMA) | HGDSTLYADSVKGRFTISRDNAKNSIYLQMNSLRPEDTALYYCNKVPWGDY |
| (SEQ ID NO: 121) | HPRNVYWGQGTQVTVSS |
| Exemplary anti-target | EVQLVESGGGLVQPGRSLTLSCAASTNIFSISPGGWYRQAPGKQRELVAAIH |
| (BCMA) | GSSTLYADSVKGRFTISRDNAKNSIYLQMNSLRPEDTALYYCNKVPWGDYHP |
| (SEQ ID NO: 122) | RNVYWGQGTQVTVSS |
| Exemplary anti-target | EVQLVESGGGLVQPGRSLTLSCAASTNHFSISPMGWYRQAPGKQRELVAAI |
| (BCMA) | HGSSTLYADSVKGRFTISRDNAKNSIYLQMNSLRPEDTALYYCNKVPWGDYH |
| (SEQ ID NO: 123) | PRVVYWGQGTQVTVSS |
| Exemplary anti-target | EVQLVESGGGLVQPGRSLTLSCAASTNIFSASPMGWYRQAPGKQRELVAAI |
| (BCMA) | HGSSTLYADSVKGRFTISRDNAKNSIYLQMNSLRPEDTALYYCNKVPWGDYH |
| (SEQ ID NO: 124) | PRNVNWGQGTQVTVSS |
| Exemplary anti-target | EVQLVESGGGLVQPGRSLTLSCAASTNIFSASPMGWYRQAPGKQRELVAAI |
| (BCMA) | HGSSTLYADSVKGRFTISRDNAKNSIYLQMNSLRPEDTALYYCNKVPWGRYH |
| (SEQ ID NO: 125) | PRNVYWGQGTQVTVSS |
| Exemplary anti-target | EVQLVESGGGLVQPGRSLTLSCAASTNISSISPMGWYRQAPGKQRELVAAIH |
| (BCMA) | GTSTLYADSVKGRFTISRDNAKNSIYLQMNSLRPEDTALYYCNKVPWGDYHP |
| (SEQ ID NO: 126) | GNVYWGQGTQVTVSS |
| Exemplary anti-target | EVQLVESGGGLVQPGRSLTLSCAASTNIESISPMGWYRQAPGKQRELVAAIH |
| (BCMA) | GTSTLYADSVKGRFTISRDNAKNSIYLQMNSLRPEDTALYYCNKVPWGDYHP |
| (SEQ ID NO: 127) | GNVYWGQGTQVTVSS |
| Exemplary anti-target | EVQLVESGGGLVQPGRSLTLSCAASTNIFSISPYGWYRQAPGKQRELVAAIH |
| (BCMA) | GTSTLYADSVKGRFTISRDNAKNSIYLQMNSLRPEDTALYYCNKVPWGDYHP |
| (SEQ ID NO: 128) | GNVYWGQGTQVTVSS |
| Exemplary anti-target | EVQLVESGGGLVQPGRSLTLSCAASTNIASISPMGWYRQAPGKQRELVAAIH |
| (BCMA) | GTSTLYADSVKGRFTISRDNAKNSIYLQMNSLRPEDTALYYCNKVPWGDYHP |
| (SEQ ID NO: 129) | GNVYWGQGTQVTVSS |
| Exemplary anti-target | EVQLVESGGGLVQPGRSLTLSCAASTNIASISPMGWYRQAPGKQRELVAAIH |
| (BCMA) | GKSTLYADSVKGRFTISRDNAKNSIYLQMNSLRPEDTALYYCNKVPWGDYHP |
| (SEQ ID NO: 130) | GNVYWGQGTQVTVSS |
| Exemplary anti-target | EVQLVESGGGLVQPGRSLTLSCAASTNIASISPMGWYRQAPGKQRELVAAIH |
| (BCMA) | GSSTLYADSVKGRFTISRDNAKNSIYLQMNSLRPEDTALYYCNKVPWGDYHP |
| (SEQ ID NO: 131) | GNVYWGQGTQVTVSS |
| Exemplary anti-target | EVQLVESGGGLVQPGRSLTLSCAASTNITSISPMGWYRQAPGKQRELVAAIH |
| (BCMA) | GDSTLYADSVKGRFTISRDNAKNSIYLQMNSLRPEDTALYYCNKVPWGDYH |
| (SEQ ID NO: 132) | PGNVYWGQGTQVTVSS |
| Exemplary anti-target | EVQLVESGGGLVQPGRSLTLSCAASTNIMSISPMGWYRQAPGKQRELVAAI |
| (BCMA) | HGNSTLYADSVKGRFTISRDNAKNSIYLQMNSLRPEDTALYYCNKVPWGDY |
| (SEQ ID NO: 133) | HPGNVYWGQGTQVTVSS |
| Exemplary anti-target | EVQLVESGGGLVQPGRSLTLSCAASTNITSISPMGWYRQAPGKQRELVAAIH |
| (BCMA) | GNSTLYADSVKGRFTISRDNAKNSIYLQMNSLRPEDTALYYCNKVPWGDYH |
| (SEQ ID NO: 134) | PGNVYWGQGTQVTVSS |
| Exemplary anti-target | EVQLVESGGGLVQPGRSLTLSCAASTNIVSISPMGWYRQAPGKQRELVAAIH |
| (BCMA) | GHSTLYADSVKGRFTISRDNAKNSIYLQMNSLRPEDTALYYCNKVPWGDYH |
| (SEQ ID NO: 135) | PGNVYWGQGTQVTVSS |
| Exemplary anti-target | EVQLVESGGGLVQPGRSLTLSCAASTNIVSISPMGWYRQAPGKQRELVAAIH |
| (BCMA) | GKSTLYADSVKGRFTISRDNAKNSIYLQMNSLRPEDTALYYCNKVPWGDYHP |
| (SEQ ID NO: 136) | GNVYWGQGTQVTVSS |
| Exemplary anti-target | EVQLVESGGGLVQPGRSLTLSCAASTNVVSISPMGWYRQAPGKQRELVAAI |
| (BCMA) | HGKSTLYADSVKGRFTISRDNAKNSIYLQMNSLRPEDTALYYCNKVPWGDY |
| (SEQ ID NO: 137) | HPNNVYWGQGTQVTVSS |
| Exemplary anti-target | EVQLVESGGGLVQPGRSLTLSCAASTNIISISPMGWYRQAPGKQRELVAAIH |
| (BCMA) | GASTLYADSVKGRFTISRDNAKNSIYLQMNSLRPEDTALYYCNKVPWGDYHP |
| (SEQ ID NO: 138) | GNVYWGQGTQVTVSS |
| Exemplary anti-target | EVQLVESGGGLVQPGRSLTLSCAASTNIFSITPMGWYRQAPGKQRELVAAIH |
| (BCMA) | GASTLYADSVKGRFTISRDNAKNSIYLQMNSLRPEDTALYYCNKVPWGDYHP |
| (SEQ ID NO: 139) | GNVYWGQGTQVTVSS |
| Exemplary anti-target | EVQLVESGGGLVQPGRSLTLSCAASTNITSISPMGWYRQAPGKQRELVAAIH |
| (BCMA) | GFETLYADSVKGRFTISRDNAKNSIYLQMNSLRPEDTALYYCNKVPWGDYHP |
| (SEQ ID NO: 140) | GNVYWGQGTQVTVSS |
| Exemplary anti-target | EVQLVESGGGLVQPGRSLTLSCAASTNIQSISPMGWYRQAPGKQRELVAAI |
| (BCMA) | HGFETLYADSVKGRFTISRDNAKNSIYLQMNSLRPEDTALYYCNKVPWGDYH |
| (SEQ ID NO: 141) | PGNVYWGQGTQVTVSS |
| Exemplary anti-target | EVQLVESGGGLVQPGRSLTLSCAASTSDFSISPMGWYRQAPGKQRELVAAI |
| (BCMA) | HGFETLYADSVKGRFTISRDNAKNSIYLQMNSLRPEDTALYYCNKVPWGDYH |
| (SEQ ID NO: 142) | PGNVYWGQGTQVTVSS |
| Exemplary anti-target | EVQLVESGGGLVQPGRSLTLSCAASTNIDSISPMGWYRQAPGKQRELVAAIH |
| (BCMA) | GFQTLYADSVKGRFTISRDNAKNSIYLQMNSLRPEDTALYYCNKVPWGDYH |
| (SEQ ID NO: 143) | PGNVYWGQGTQVTVSS |
| Exemplary anti-target | EVQLVESGGGLVQPGRSLTLSCAASTNIMSISPMGWYRQAPGKQRELVAAI |
| (BCMA) | HGFSTVYADSVKGRFTISRDNAKNSIYLQMNSLRPEDTALYYCNKVPWGDY |
| (SEQ ID NO: 144) | HPGNVYWGQGTQVTVSS |
| Exemplary anti-target | EVQLVESGGGLVQPGRSLTLSCAASTNIESISPMGWYRQAPGKQRELVAAIH |
| (BCMA) | GFSTLYADSVKGRFTISRDNAKNSIYLQMNSLRPEDTALYYCNKVPWGDYHP |
| (SEQ ID NO: 145) | GNVYWGQGTQVTVSS |
| Exemplary anti-target | EVQLVESGGGLVQPGRSLTLSCAASTNIFSSSPMGWYRQAPGKQRELVAAI |
| (BCMA) | HGFKTLYADSVKGRFTISRDNAKNSIYLQMNSLRPEDTARYYCNKVPWGDY |
| (SEQ ID NO: 146) | HPGNVYWGQGTQVTVSS |
| Exemplary anti-target | EVQLVESGGGLVQPGRSLTLSCAASTNIFSSSPMGWYRQAPGKQRELVAAI |
| (BCMA) | HGFSTLYADSVKGRFTISRDNAKNSIYLQMNSLRPEDTALYYCNKVPWGDYH |
| (SEQ ID NO: 147) | PGNVYWGQGTQVTVSS |
| Exemplary anti-target | EVQLVESGGGLVQPGRSLTLSCAASTNIFSNSPMGWYRQAPGKQRELVAAI |
| (BCMA) | HGFSTLYADSVKGRFTISRDNAKNSIYLQMNSLRPEDTALYYCNKVPWGDYH |
| (SEQ ID NO: 148) | PGNVYWGQGTQVTVSS |
| Exemplary anti-target | EVQLVESGGGLVQPGRSLTLSCAASTNIFSTSPMGWYRQAPGKQRELVAAI |
| (BCMA) | HGFSTIYADSVKGRFTISRDNAKNSIYLQMNSLRPEDTALYYCNKVPWGDYH |
| (SEQ ID NO: 149) | PGNVYWGQGTQVTVSS |
| Exemplary anti-target | EVQLVESGGGLVQPGRSLTLSCAASTNIFSTSPMGWYRQAPGKQRELVAAI |
| (BCMA) | HGFSTIYADSVKGRFTISRDNAKNSIYLQMNSLRPEDTALYYCNKVPWGDYH |
| (SEQ ID NO: 150) | PLNVYWGQGTQVTVSS |
| Exemplary anti-target | EVQLVESGGGLVQPGRSLTLSCVASTNIFSTSPMGWYRQAPGKQRELVAAI |
| (BCMA) | HGFSTLYADSVKGRFTISRDNAKNSIYLQMNSLRPEDTALYYCNKVPWGDYH |
| (SEQ ID NO: 151) | PGNVYWGQGTQVTVSS |
| Exemplary anti-target | EVQLVESGGGLVQPGRSLTLSCAASTNIFSDSPMGWYRQAPGKQRELVAAI |
| (BCMA) | HGFSTFYADSVKGRFTISRDNAKNSIYLQMNSLRPEDTALYYCNKVPWGDY |
| (SEQ ID NO: 152) | HPGNVYWGQGTQVTVSS |
| Exemplary anti-target | EVQLVESGGGLVQPGRSLTLSCAASTNIFSQSPMGWYRQAPGKQRELVAAI |
| (BCMA) | HGDSTLYADSVKGRFTISRDNAKNSIYLQMNSLRPEDTALYYCNKVPWGDY |
| (SEQ ID NO: 153) | HPGNVCWGQGTQVTVSS |
| Exemplary anti-target | EVQLVESGGGLVQPGRSLTLSCAASTNIFSQSPMGWYRQAPGKQRELVAAI |
| (BCMA) | HGKSTLYADSVKGRFTISRDNAKNSIYLQMNSLRPEDTALYYCNKVPWGDY |
| (SEQ ID NO: 154) | HPSNVYWGKGTQVTVSS |
| Exemplary anti-target | EVQLVESGGGLVQPGRSLTLSCAASTNIFSRSPMGWYRQAPGKQRELVAAI |
| (BCMA) | HGESTLYADSVKGRFTISRDNAKNSIYLQMNSLRPEDTALYYCNKVPWGRYH |
| (SEQ ID NO: 155) | PGNVYWGQGTQVTVSS |
| Exemplary anti-target | EVQLVESGGGLVQPGRSLTLSCAASTNIFSRSPMGWYRQAPGKQRELVAAI |
| (BCMA) | HGISTLYADSVKGRFTISRDNAKNSIYLQMNSLRPEDTALYYCNKVPWGDYH |
| (SEQ ID NO: 156) | PGNVYWGQGTQVTVSS |
| Exemplary anti-target | EVQLVESGGGLVQPGRSLTLSCAASTNIFSRSPMGWYRQAPGKQRELVAAI |
| (BCMA) | HGSSTLYADSVKGRFTISRDNAKNSIYLQMNSLRPEDTALYYCNKVPWGDYH |
| (SEQ ID NO: 157) | PGNVYWGQGTQVTVSS |
| Exemplary anti-target | EVQLVESGGGLVQPGRSLTLSCAASTNIFSGSPMGWYRQAPGKQRELVAAI |
| (BCMA) | HGNSTLYADSVKGRFTISRDNAKNSIYLQMNSLRPEDTALYYCNKVPWGDY |
| (SEQ ID NO: 158) | HPGNVYWGQGTQVTVSS |
| Exemplary anti-target | EVQLVESGGGLVQPGRSLTLSCAASSNIFSISPMGWYRQAPGKQRELVAAIH |
| (BCMA) | GSSTLYADSVKGRFTISRDNAKNSIYLQMNSLRPEDTALYYCNKVPWGDYHP |
| (SEQ ID NO: 159) | GNVYWGQGTQVTVSS |
| Exemplary anti-target | EVQLVESGGGLVQPGRSLTLSCAASTNIFSIYPMGWYRQAPGKQRELVAAIH |
| (BCMA) | GSSTLYADSVKGRFTISRDNAKNSIYLQMNSLRPEDTALYYCNKVPWGDYHP |
| (SEQ ID NO: 160) | KNVYWGQGTQVTVSS |
| Exemplary anti-target | EVQLVESGGGLVQPGRSLTLSCAASTNIFSKSPMGWYRQAPGKQRELVAAI |
| (BCMA) | HGSSTLYADSVKGRFTISRDNAKNSIYLQMNSLRPEDTALYYCNKVPWGDYH |
| (SEQ ID NO: 161) | PGNVYWGQGTQVTVSS |
| Exemplary anti-target | EVQLVESGGGLVQPGRSLTLSCAASTNIFSKSPMGWYRQAPGKQRELVAAI |
| (BCMA) | HGSSTLYADSVKGRFTISRDNAKNSIYLQMNSLRPEDTALYYCNKVPWGDYH |
| (SEQ ID NO: 162) | PRNVYWGQGTQVTVSS |
| Exemplary anti-target | EVQLVESGGGLVQPGRSLTLSCAASTNEFSISPMGWYRQAPGKQRELVAAI |
| (BCMA) | HGLSTLYADSVKGRFTISRDNAKNSIYLQMNSLRPEDTALYYCNKVPWGAYH |
| (SEQ ID NO: 163) | PRNVYWGQGTQVTVSS |
| Exemplary anti-target | EVQLVESGGGLVQPGRSLTLSCAASTNEFSISPMGWYRQAPGKQRELVAAI |
| (BCMA) | HGESTLYADSVKGRFTISRDNAKNSIYLQMNSLRPEDTALYYCNKVPWGDYH |
| (SEQ ID NO: 164) | PGNVYWGQGTQVTVSS |
| Exemplary anti-target | EVQLVESGGGLVQPGRSLTLSCAASTNIPSISPMGWYRQAPGKQRELVAAIH |
| (BCMA) | GESTLYADSVKGRFTISRDNAKNSIYLQMNSLRPEDTALYYCNKVPWGDYHP |
| (SEQ ID NO: 165) | RNVAWGQGTQVTVSS |
| Exemplary anti-target | EVQLVESGGGLVQPGRSLTLSCAASTNIPSISPMGWYRQAPGKQRELVAAIH |
| (BCMA) | GASTLYADSVKGRFTISRDNAKNSIYLQMNSLRPEDTALYYCNKVPWGDYHP |
| (SEQ ID NO: 166) | RNVAWGQGTQVTVSS |
| Exemplary anti-target | EVQLVESGGGLVQPGRSLTLSCAASTNIPSISPMGWYRQAPGKQRELVAAIH |
| (BCMA) | GESTLYADSVKGRFTISRDNAKNSIYLQMNSLRPEDTALYYCNKVPWGDYHP |
| (SEQ ID NO: 167) | RNVYWGQGTQVTVSS |
| Exemplary anti-target | EVQLVESGGGLVQPGRSLTLSCAASTNIPSISPMGWYRQAPGKQRELVAAIH |
| (BCMA) | GDSTLYADSVKGRFTISRDNAKNSIYLQMNSLRPEDTALYYCNKVPWGDYH |
| (SEQ ID NO: 168) | PRNVYWGQGTQVTVSS |
| Exemplary anti-target | EVQLVESGGGLVQPGRSLTLSCAASTNITSISPMGWYRQAPGKQRELVAAIH |
| (BCMA) | GVSTLYADSVKGRFTISRDNAKNSIYLQMNSLRPEDTALYYCNKVPWGDYHP |
| (SEQ ID NO: 169) | RNVQWGQGTQVTVSS |
| Exemplary anti-target | EVQLVESGGGLVQPGRSLTLSCAASTNIPSISPMGWYRQAPGKQRELVAAIH |
| (BCMA) | GQSTLYADSVKGRFTISRDNAKNSIYLQMNSLRPEDTALYYCNKVPWGDYH |
| (SEQ ID NO: 170) | PRNVQWGQGTQVTVSS |
| Exemplary anti-target | EVQLVESGGGLVQPGRSLTLSCAASTNIVSISPMGWYRQAPGKQRELVAAIH |
| (BCMA) | GDSTLYADSVKGRFTISRDNAKNSIYLQMNSLRPEDTALYYCNKVPWGDYH |
| (SEQ ID NO: 171) | PRNVSWGQGTQVTVSS |
| Exemplary anti-target | EVQLVESGGGLVQPGRSLTLSCAASSNIFSISPMGWYRQAPGKQRELVAAIH |
| (BCMA) | GESTLYADSVKGRFTISRDNAKNSIYLQMNSLRPEDTALYYCNKVPWGDYHP |
| (SEQ ID NO: 172) | RNVTWGQGTQVTVSS |
| Exemplary anti-target | EVQLVESGGGLVQPGRSLTLSCAASTNIDSISPMGWYRQAPGKQRELVAAIH |
| (BCMA) | GESTLYADSVKGRFTISRDNAKNSIYLQMNSLRPEDTALYYCNKVPWGDYHP |
| (SEQ ID NO: 173) | RNVTWGQGTQVTVSS |
| Exemplary anti-target | EVQLVESGGGLVQPGRSLTLSCAASTNIDSISPMGWYRQAPGKQRELVAAIH |
| (BCMA) | GSSTLYADSVKGRFTISRDNAKNSIYLQMNSLRPEDTALYYCNKVPWGDYHP |
| (SEQ ID NO: 174) | RNVTWGQGTQVTVSS |
| Exemplary anti-target | EVQLVESGGGLVQPGRSLTLSCAASTNIRSISPMGWYRQAPGKQRELVAAIH |
| (BCMA) | GSSTLYADSVKGRFTISRDNAKNSIYLQMNSLRPEDTALYYCNKVPWGDYHP |
| (SEQ ID NO: 175) | RNVVWGQGTQVTVSS |
| Exemplary anti-target | EVQLVESGGGLVQPGRSLTLSCAASTNITSISPMGWYRQAPGKQRELVAAIS |
| (BCMA) | GFSTLYADSVKGRFTISRDNAKNSIYLQMNSLRPEDTALYYCNEVPWGDYHP |
| (SEQ ID NO: 176) | RNVYWGQGTQVTVSS |
| Exemplary anti-target | EVQLVESGGGLVQPGRSLTLSCAASTNITSISPMGWYRQAPGKQRELVAAIH |
| (BCMA) | GESTLYADSVKGRFTISRDNAKNSIYLQMNSLRPEDTALYYCNKVPWGDYHP |
| (SEQ ID NO: 177) | RNVYWGQGTQVTVSS |
| Exemplary anti-target | EVQLVESGGGLVQPGRSLTLSCAASTNITSVSPMGWYRQAPGKQRELVAAI |
| (BCMA) | HGPSTLYADSVKGRFTISRDNAKNSIYLQMNSLRPEDTALYYCNKVPWGDY |
| (SEQ ID NO: 178) | HPTNVYWGQGTQVTVSS |
| Exemplary anti-target | EVQLVESGGGLVQPGRSLTLSCAASTNIGSISPMGWYRQAPGKQRELVAAI |
| (BCMA) | HGQSTLYADSVKGRFTISRDNAKNSIYLQMNSLRPEDTALYYCNKVPWGDY |
| (SEQ ID NO: 179) | HPQNVYWGQGTQVTVSS |
| Exemplary anti-target | EVQLVESGGGLVQPGRSLTLSCAASTNIESISPMGWYRQAPGKQRELVAAIH |
| (BCMA) | GKSTLYADSVKGRFTISRDNAKNSIYLQMNSLRPEDTALYYCNKVPWGDYHP |
| (SEQ ID NO: 180) | RRVYWGQGTQVTVSS |
| Exemplary anti-target | EVQLVESGGGLVQPGRSLTLSCAASTNIVSISPMGWYRQAPGKQRELVAAIH |
| (BCMA) | GDSTLYADSVKGRFTISRDNAKNSIYLQMNSLRPEDTALYYCNKVPWGDYH |
| (SEQ ID NO: 189) | PRRVYWGQGTQVTVSS |
| Exemplary anti-target | EVQLVESGGGLVQPGRSLTLSCAASTNIDSISPMGWYRQAPGKQRELVAAIH |
| (BCMA) | GNSTLYADSVKGRFTISRDNAKNSIYLQMNSLRPEDTALYYCNKVPWGDYH |
| (SEQ ID NO: 190) | PRMVYWGQGTQVTVSS |
| Exemplary anti-target | EVQLVESGGGLVQPGRSLTLSCAASTNIFMISPMGWYRQAPGKQRELVAAI |
| (BCMA) | HGDSTLYADSVKGRFTISRDNAKNSIYLQMNSLRPEDTALYYCNKVPWGRY |
| (SEQ ID NO: 191) | HPRNVYWGQGTQVTVSS |
| Exemplary anti-target | EVQLVESGGGLVQPGRSLTLSCAASTNIFRISPMGWYRQAPGKQRELVAAIH |
| (BCMA) | GDSTLYADSVKGRFTISRDNAKNSIYLQMNSLRPEDTALYYCNKVPWGRYHP |
| (SEQ ID NO: 192) | RNVYWGQGTQVTVSS |
| Exemplary anti-target | EVQLVESGGGLVQPGRSLTLSCAASTNIFSISPMGWYRQAPGKQRELVAAIH |
| (BCMA) | GDSTLYADSVKGRFTISRDNAKNSIYLQMNSLRPEDTALYYCNKVPWGEYHP |
| (SEQ ID NO: 193) | RNVYWGQGTQVTVSS |
| Exemplary anti-target | EVQLVESGGGLVQPGRSLTLSCAASTNIFSISPMGWYRQAPGKQRELVAAIH |
| (BCMA) | GDSTLYADSVKGRFTISRDNAKNSIYLQMNSLRPEDTALYYCNKVPWGKYHP |
| (SEQ ID NO: 194) | RNVYWGQGTQVTVSS |
| Exemplary anti-target | EVQLVESGGGLVQPGRSLTLSCAASTNIESISPMGWYRQAPGKQRELVAAIH |
| (BCMA) | GSSTLYADSVKGRFTISRDNAKNSIYLQMNSLRPEDTALYYCNKVPWGRYHP |
| (SEQ ID NO: 195) | RNVYWGQGTQVTVSS |
| Exemplary anti-target | EVQLVESGGGLVQPGRSLTLSCAASTNIESISPMGWYRQAPGKQRELVAAIH |
| (BCMA) | GNSTLYADSVKGRFTISRDNAKNSIYLQMNSLRPEDTALYYCNKVPWGRYHP |
| (SEQ ID NO: 196) | RNVYWGQGTQVTVSS |
| Exemplary anti-target | EVQLVESGGGLVQPGRSLTLSCAASTNISSISPMGWYRQAPGKQRELVAAIH |
| (BCMA) | GFSTLYADSVKGRFTISRDNAKNSIYLQMNSLRPEDTALYYCNKVPWGYYHP |
| (SEQ ID NO: 197) | RNVYWGQGTQVTVSS |
| Exemplary anti-target | EVQLVESGGGLVQPGRSLTLSCAASTNISSISPMGWYRQAPGKQRELVAAIH |
| (BCMA) | GHSTLYADSVKGRFTISRDNAKNSIYLQMNSLRPEDTALYYCNKVPWGRYHP |
| (SEQ ID NO: 198) | RNVYWGQGTQVTVSS |
| Exemplary anti-target | EVQLVESGGGLVQPGRSLTLSCAASTNISSISPMGWYRQAPGKQRELVAAIH |
| (BCMA) | GFSTVYADSVKGRFTISRDNAKNSIYLQMNSLRPEDTALYYCNKVPWGRYHP |
| (SEQ ID NO: 199) | RNVYWGQGTQVTVSS |
| Exemplary anti-target | EVQLVESGGGLVQPGRSLTLSCAASTNIFSIRPMGWYRQAPGKQRELVAAIH |
| (BCMA) | GFSTVYADSVKGRFTISRDNAKNSIYLQMNSLRPEDTALYYCNKVPWGDYH |
| (SEQ ID NO: 200) | PRNVYWGQGTQVTVSS |
| Exemplary anti-target | EVQLVESGGGLVQPGRSLTLSCAASTNIFSIYPMGWYRQAPGKQRELVAAIH |
| (BCMA) | GFSTYYADSVKGRFTISRDNAKNSIYLQMNSLRPEDTALYYCNKVPWGSYHP |
| (SEQ ID NO: 201) | RNVYWGQGTQVTVSS |
| Exemplary anti-target | EVQLVESGGGLVQPGRSLTLSCAASTNIFNISPMGWYRQAPGKQRELVAAI |
| (BCMA) | HGFSTYYADSVKGRFTISRDNAKNSIYLQMNSLRPEDTALYYCNKVPWGRYH |
| (SEQ ID NO: 202) | PRNVYWGQGTQVTVSS |
| Exemplary anti-target | EVQLVESGGGLVQPGRSLTLSCAASTNIFSSSPMGWYRQAPGKQRELVAAI |
| (BCMA) | HGFSTWYADSVKGRFTISRDNAKNSIYLQMNSLRPEDTALYYCNKVPWGRY |
| (SEQ ID NO: 203) | HPRNVYWGQGTQVTVSS |
| Exemplary anti-target | EVQLVESGGGLVQPGRSLTLSCAASTNISSISPMGWYRQAPGKQRELVAAIH |
| (BCMA) | GFDTLYADSVKGRFTISRDNAKNSIYLQMNSLRPEDTALYYCNKVPWGDYH |
| (SEQ ID NO: 204) | PRNVYWGQGTQVTVSS |
| Exemplary anti-target | EVQLVESGGGLVQPGRSLTLSCAASTNIFSINPMGWYRQAPGKQRELVAAI |
| (BCMA) | HGFDTLYADSVKGRFTISRDNAKNSIYLQMNSLRPEDTALYYCNKVPWGDY |
| (SEQ ID NO: 205) | HPRNVSWGQGTQVTVSS |
| Exemplary anti-target | EVQLVESGGGLVQPGRSLTLSCAASTNIFSITPMGWYRQAPGKQRELVAAIH |
| (BCMA) | GRSTLYADSVKGRFTISRDNAKNSIYLQMNSLRPEDTALYYCNKVPWGSYHP |
| (SEQ ID NO: 206) | RNVYWGQGTQVTVSS |
| Exemplary anti-target | EVQLVESGGGLVQPGRSLTLSCAASTNIFSITPMGWYRQAPGKQRELVAAIH |
| (BCMA) | GTSTLYADSVKGRFTISRDNAKNSIYLQMNSLRPEDTALYYCNKVPWGRYHP |
| (SEQ ID NO: 207) | RNVYWGQGTQVTVSS |
| Exemplary anti-target | EVQLVESGGGLVQPGRSLTLSCAASTNIFSITPMGWYRQAPGKQRELVAAIH |
| (BCMA) | GESTLYADSVKGRFTISRDNAKNSIYLQMNSLRPEDTALYYCNKVPWGRYHP |
| (SEQ ID NO: 208) | RNVYWGQGTQVTVSS |
| Exemplary anti-target | EVQLVESGGGLVQPGRSLTLSCAASTNIFSITPMGWYRQAPGKQRELVAAIH |
| (BCMA) | GESTLYADSVKGRFTISRDNAKNSIYLQMNSLRPEDTALYYCNKVPWGDYHP |
| (SEQ ID NO: 209) | RDVYWGQGTQVTVSS |
| Exemplary anti-target | EVQLVESGGGLVQPGRSLTLSCAASTNIFSTSPYGWYRQAPGKQRELVAAIH |
| (BCMA) | GFSTIYADSVKGRFTISRDNAKNSIYLQMNSLRPEDTALYYCNKVPWGDYHP |
| (SEQ ID NO: 210) | GNVYWGQGTQVTVSS |
| Exemplary anti-target | EVQLVESGGGLVQPGRSLTLSCAASTNIFSTSPGGWYRQAPGKQRELVAAIH |
| (BCMA) | GFSTIYADSVKGRFTISRDNAKNSIYLQMNSLRPEDTALYYCNKVPWGDYHP |
| (SEQ ID NO: 211) | GNVYWGQGTQVTVSS |
| Exemplary anti-target | EVQLVESGGGLVQPGRSLTLSCAASTNIFSITPYGWYRQAPGKQRELVAAIH |
| (BCMA) | GASTLYADSVKGRFTISRDNAKNSIYLQMNSLRPEDTALYYCNKVPWGDYHP |
| (SEQ ID NO: 212) | GNVYWGQGTQVTVSS |
| Exemplary anti-target | EVQLVESGGGLVQPGRSLTLSCAASTNIFSITPGGWYRQAPGKQRELVAAIH |
| (BCMA) | GASTLYADSVKGRFTISRDNAKNSIYLQMNSLRPEDTALYYCNKVPWGDYHP |
| (SEQ ID NO: 213) | GNVYWGQGTQVTVSS |
| Exemplary anti-target | QVQLVESGGGLVQPGESLRLSCAASTNIFSISPMGWYRQAPGKQRELVAAI |
| (BCMA) | HGFSTLYADSVKGRFTISRDNAKNTIYLQMNSLKPEDTAVYYCNKVPWGDY |
| (SEQ ID NO: 214) | HPRNVYWGQGTQVTVSS |
| Exemplary anti-target | QVQLVESGGGLVQPGGSLRLSCAASGRTFSVRGMAWYRQAGNNRALVAT |
| (MSLN) | MNPDGFPNYADAVKGRFTISWDIAENTVYLQMNSLNSEDTTVYYCNSGPY |
| (SEQ ID NO: 215) | WGQGTQVTVSS |
| Exemplary anti-target | QVQLVESGGGLVQAGGSLRLSCAASGSIPSIEQMGWYRQAPGKQRELVAAL |
| (MSLN) | TSGGRANYADSVKGRFTISGDNVRNMVYLQMNSLKPEDTAIYYCSAGRFKG |
| (SEQ ID NO: 216) | DYAQRSGMDYWGKGTLVTVSS |
| Exemplary anti-target | QVQLVESGGGLVQAGGSLRLSCAFSGTTYTFDLMSWYRQAPGKQRTVVASI |
| (MSLN) | SSDGRTSYADSVRGRFTISGENGKNTVYLQMNSLKLEDTAVYYCLGQRSGVR |
| (SEQ ID NO: 217) | AFWGQGTQVTVSS |
| Exemplary anti-target | QVQLVESGGGLVQAGGSLRLSCVASGSTSNINNMRWYRQAPGKERELVAV |
| (MSLN) | ITRGGYAIYLDAVKGRFTISRDNANNAIYLEMNSLKPEDTAVYVCNADRVEG |
| (SEQ ID NO: 218) | TSGGPQLRDYFGQGTQVTVSS |
| Exemplary anti-target | QVQLVESGGGLVQAGGSLRLSCAASGSTFGINAMGWYRQAPGKQRELVAV |
| (MSLN) | ISRGGSTNYADSVKGRFTISRDNAENTVSLQMNTLKPEDTAVYFCNARTYTR |
| (SEQ ID NO: 219) | HDYWGQGTQVTVSS |
| Exemplary anti-target | QVRLVESGGGLVQAGGSLRLSCAASISAFRLMSVRWYRQDPSKQREWVATI |
| (MSLN) | DQLGRTNYADSVKGRFAISKDSTRNTVYLQMNMLRPEDTAVYYCNAGGGP |
| (SEQ ID NO: 220) | LGSRWLRGRHWGQGTQVTVSS |
| Exemplary anti-target | QVRLVESGGGLVQAGESLRLSCAASGRPFSINTMGWYRQAPGKQRELVASI |
| (MSLN) | SSSGDFTYTDSVKGRFTISRDNAKNTVYLQMNSLKPEDTAVYYCNARRTYLP |
| (SEQ ID NO: 221) | RRFGSWGQGTQVTVSS |
| Exemplary anti-target | QVQPVESGGGLVQPGGSLRLSCVVSGSDFTEDAMAWYRQASGKERESVAF |
| (MSLN) | VSKDGKRILYLDSVRGRFTISRDIDKKTVYLQMDNLKPEDTGVYYCNSAPGAA |
| (SEQ ID NO: 222) | RNYWGQGTQVTVSS |
| Exemplary anti-target | QVQPVESGGGLVQPGGSLRLSCVVSGSDFTEDAMAWYRQASGKERESVAF |
| (MSLN) | VSKDGKRILYLDSVRGRFTISRDIYKKTVYLQMDNLKPEDTGVYYCNSAPGAA |
| (SEQ ID NO: 223) | RNVWGQGTQVTVSS |
| Exemplary anti-target | EVQLVESGGGLVQPGNSLRLSCAASGFTFSSFGMSWVRQAPGKGLEWVSSI |
| (MSLN) | SGSGSDTLYADSVKGRFTISRDNAKTTLYLQMNSLRPEDTAVYYCTIGGSLSR |
| (SEQ ID NO: 224) | SSQGTLVTVSS |
| Exemplary anti-target | QVQIVESGGGLVQAGGSLRLSCVASGLTYSIVAVGWYRQAPGKEREMVADI |
| (MSLN) | SPVGNTNYADSVKGRFTISKENAKNTVYLQMNSLKPEDTAVYYCHIVRGWL |
| (SEQ ID NO: 225) | DERPGPGPIVYWGQGTQVTVSS |
| Exemplary anti-target | QVQLVESGGGLVQTGGSLRLSCAASGLTFGVYGMEWFRQAPGKQREWVA |
| (MSLN) | SHTSTGYVYYRDSVKGRFTISRDNAKSTVYLQMNSLKPEDTAIYYCKANRGSY |
| (SEQ ID NO: 226) | EYWGQGTQVTVSS |
| Exemplary anti-target | QVQLVESGGGLVQAGGSLRLSCAASTTSSINSMSWYRQAQGKQREPVAVIT |
| (MSLN) | DRGSTSYADSVKGRFTISRDNAKNTVYLQMNSLKPEDTAIYTCHVIADWRGY |
| (SEQ ID NO: 227) | WGQGTQVTVSS |
| Exemplary anti-target | QVQLVESGGGLVQAGGSLRLSCAASGRTLSRYAMGWFRQAPGKERQFVAA |
| (MSLN) | ISRSGGTTRYSDSVKGRFTISRDNAANTFYLQMNNLRPDDTAVYYCNVRRRG |
| (SEQ ID NO: 228) | WGRTLEYWGQGTQVTVSS |
| Exemplary anti-target | QVQLGESGGGLVQAGGSLRLSCAASGSIFSPNAMIWHRQAPGKQREPVASI |
| (MSLN) | NSSGSTNYGDSVKGRFTVSRDIVKNTMYLQMNSLKPEDTAVYYCSYSDFRR |
| (SEQ ID NO: 229) | GTQYWGQGTQVTVSS |
| Exemplary anti-target | QVQLVESGGGLVPSGGSLRLSCAASGATSAITNLGWYRRAPGQVREMVARI |
| (MSLN) | SVREDKEDYEDSVKGRFTISRDNTQNLVYLQMNNLQPHDTAIYYCGAQRW |
| (SEQ ID NO: 230) | GRGPGTTWGQGTQVTVSS |
| Exemplary anti-target | QVQLVESGGGLVQAGGSLRLSCAASGSTFRIRVMRWYRQAPGTERDLVAVI |
| (MSLN) | SGSSTYYADSVKGRFTISRDNAKNTLYLQMNNLKPEDTAVYYCNADDSGIAR |
| (SEQ ID NO: 231) | DYWGQGTQVTVSS |
| Exemplary anti-target | QVQLVESGGGLVQAGESRRLSCAVSGDTSKFKAVGWYRQAPGAQRELLAW |
| (MSLN) | INNSGVGNTAESVKGRFTISRDNAKNTVYLQMNRLTPEDTDVYYCRFYRRFG |
| (SEQ ID NO: 232) | INKNYWGQGTQVTVSS |
| Exemplary anti-target | QVQLVESGGGLVQAGGSLRLSCAASGSTFGNKPMGWYRQAPGKQRELVA |
| (MSLN) | VISSDGGSTRYAALVKGRFTISRDNAKNTVYLQMESLVAEDTAVYYCNALRTY |
| (SEQ ID NO: 233) | YLNDPVVFSWGQGTQVTVSS |
| Exemplary anti-target | QVQLVESGGGLVQAGGSLRLSCAASGSTSSINTMYWYRQAPGKERELVAFIS |
| (MSLN) | SGGSTNVRDSVKGRFSVSRDSAKNIVYLQMNSLTPEDTAVYYCNTYIPLRGTL |
| (SEQ ID NO: 234) | HDYWGQGTQVTVSS |
| Exemplary anti-target | QVQLVESGGGLVQAGGSLRLSCVASGRIDRITTMGWYRQAPGKQRELVAT |
| (MSLN) | ISNRGTSNYANSVKGRFTISRDNAKNTVYLQMNSLKPEDTAVYYCNARKWG |
| (SEQ ID NO: 235) | RNYWGQGTQVTVSS |
| Exemplary anti-target | QVQLVESGGGLVQARGSLRLSCTASGRTIGINDMAWYRQAPGNOBELVATI |
| (MSLN) | TKGGTTDYADSVDGRFTISRDNAKNTVYLQMNSLKPEDTAVYYCNTKRREW |
| (SEQ ID NO: 236) | AKDFEYWGQGTQVTVSS |
| Exemplary anti-target | QVQLVESGGGLVQAGGSLRLSCAASAIGSINSMSWYRQAPGKQREPVAVIT |
| (MSLN) | DRGSTSYADSVKGRFTISRDNAKNTVYLQMNSLKPEDTAIYTCHVIADWRGY |
| (SEQ ID NO: 237) | WGQGTQVTVSS |
| Exemplary anti-target | QVQLVESGGGLVQAGGSLRLSCAASGSTSSINTMYWFRQAPGEERELVATI |
| (MSLN) | NRGGSTNVRDSVKGRFSVSRDSAKNIVYLQMNRLKPEDTAVYYCNTYIPYG |
| (SEQ ID NO: 238) | GTLHDFWGQGTQVTVSS |
| Exemplary anti-target | QVQLVESGGGLVQAGGSLRLSCTTSTTFSINSMSWYRQAPGNQREPVAVIT |
| (MSLN) | NRGTTSYADSVKGRFTISRDNARNTVYLQMDSLKPEDTAIYTCHVIADWRGY |
| (SEQ ID NO: 239) | WGQGTQVTVSS |
| Exemplary anti-target | QVQLVESGGGLVQAGGSLTLSCAASGSTFSIRAMRWYRQAPGTERDLVAVI |
| (MSLN) | YGSSTYYADAVKGRFTISRDNAKNTLYLQMNNLKPEDTAVYYCNADTIGTAR |
| (SEQ ID NO: 240) | DYWGQGTQVTVSS |
| Exemplary anti-target | QVQLVESGGGLVQAGGSLRLSCVASGRTSTIDTMYWHRQAPGNERELVAY |
| (MSLN) | VTSRGTSNVADSVKGRFTISRDNAKNTAYLQMNSLKPEDTAVYYCSVRTTSY |
| (SEQ ID NO: 241) | PVDFWGQGTQVTVSS |
| Exemplary anti-target | QVQLVESGGGLVQAGGSLRLSCAASGSTSSINTMYWYRQAPGKERELVAFIS |
| (MSLN) | SGGSTNVRDSVKGRFSVSRDSAKNIVYLQMNSLKPEDTAVYYCNTYIPYGGT |
| (SEQ ID NO: 242) | LHDFWGQGTQVTVSS |
| Exemplary anti-target | QVQLVESGGGLVQPGGSLRLSCAASGGDWSANFMYWYRQAPGKQRELVA |
| (MSLN) | RISGRGVVDYVESVKGRFTISRDNAKNTVYLQMNSLKPEDTAVYYCAVASY |
| (SEQ ID NO: 243) | WGQGTQVTVSS |
| Exemplary anti-target | EVQLVESGGGLVQPGGSLRLSCAASGGDWSANFMYWYRQAPGKQRELVA |
| (MSLN) | RISGRGVVDYVESVKGRFTISRDNSKNTLYLQMNSLRAEDTAVYYCAVASYW |
| (SEQ ID NO: 244) | GQGTLVTVSS |
| Exemplary anti-target | EVQLVESGGGLVQPGGSLRLSCAASGGDWSANFMYWVRQAPGKGLEWV |
| (MSLN) | SRISGRGVVDYVESVKGRFTISRDNSKNTLYLQMNSLRAEDTAVYYCAVASY |
| (SEQ ID NO: 245) | WGQGTLVTVSS |
| Exemplary anti-target | EVQLVESGGGLVQAGGSLRLSCAASGSTSSINTMYWYRQAPGKERELVAFIS |
| (MSLN) | SGGSTNVRDSVKGRFTISRDNSKNTLYLQMNSLRAEDTAVYYCNTYIPYGGT |
| (SEQ ID NO: 246) | LHDFWGQGTLVTVSS |
| Exemplary anti-target | EVQLVESGGGLVQPGGSLRLSCAASGSTSSINTMYWYRQAPGKERELVAFIS |
| (MSLN) | SGGSTNVRDSVKGRFTISRDNSKNTLYLQMNSLRAEDTAVYYCNTYIPYGGT |
| (SEQ ID NO: 247) | LHDFWGQGTLVTVSS |
| Exemplary anti-target | EVQLVESGGGLVQPGGSLRLSCAASGSTSSINTMYWVRQAPGKGLEWVSFI |
| (MSLN) | SSGGSTNVRDSVKGRFTISRDNSKNTLYLQMNSLRAEDTAVYYCNTYIPYGG |
| (SEQ ID NO: 248) | TLHDFWGQGTLVTVSS |
| Exemplary anti-target | QVQLVESGGGVVQAGGSLRLSCAASGSTFSIRAMRWYRQAPGTERDLVAVI |
| (MSLN) | YGSSTYYADAVKGRFTISRDNSKNTLYLQMNSLRAEDTAVYYCNADTIGTAR |
| (SEQ ID NO: 249) | DYWGQGTLVTVSS |
| Exemplary anti-target | QVQLVESGGGVVQPGGSLRLSCAASGSTFSIRAMRWYRQAPGKERELVAVI |
| (MSLN) | YGSSTYYADAVKGRFTISRDNSKNTLYLQMNSLRAEDTAVYYCNADTIGTAR |
| (SEQ ID NO: 250) | DYWGQGTLVTVSSGG |
| Exemplary anti-target | QVQLVESGGGVVQPGGSLRLSCAASGSTFSIRAMRWVRQAPGKGLEWVSV |
| (MSLN) | IYGSSTYYADAVKGRFTISRDNSKNTLYLQMNSLRAEDTAVYYCNADTIGTAR |
| (SEQ ID NO: 251) | DYWGQGTLVTVSSGG |
| Exemplary anti-target | EVQLVESGGGLVQAGGSLRLSCVASGRTSTIDTMYWHRQAPGNERELVAYV |
| (MSLN) | TSRGTSNVADSVKGRFTISRDNSKNTLYLQMNSLRAEDTAVYYCSVRTTSYP |
| (SEQ ID NO: 252) | VDFWGQGTLVTVSGG |
| Exemplary anti-target | EVQLVESGGGLVQPGGSLRLSCAASGRTSTIDTMYWHRQAPGKERELVAYV |
| (MSLN) | TSRGTSNVADSVKGRFTISRDNSKNTLYLQMNSLRAEDTAVYYCSVRTTSYP |
| (SEQ ID NO: 253) | VDFWGQGTLVTVSS |
| Exemplary anti-target | EVQLVESGGGLVQPGGSLRLSCAASGRTSTIDTMYWVRQAPGKGLEWVSY |
| (MSLN) | VTSRGTSNVADSVKGRFTISRDNSKNTLYLQMNSLRAEDTAVYYCSVRTTSY |
| (SEQ ID NO: 254) | PVDFWGQGTLVTVSS |
| Exemplary anti-target | QVQLVESGGGVVQAGGSLTLSCAASGSTFSIRAMRWYRQAPGTERDLVAVI |
| (MSLN) | YGSSTYYADAVKGRFTISRDNSKNTLYLQMNSLRAEDTAVYYCNADTIGTAR |
| (SEQ ID NO: 255) | DYWGQGTLVTVSS |
| Exemplary anti-target | QVQLVESGGGVVQAGGSLRLSCAASGSTFSIRAMRWYRQAPGTERDLVAVI |
| (MSLN) | YGSSTYYADAVKGRFTISRDNSKNTLYLQMNSLRAEDTAVYYCNADTIGTAR |
| (SEQ ID NO: 256) | DYWGQGTLVTVSS |
| Exemplary anti-target | QVQLVESGGGVVQPGGSLRLSCAASGSTFSIRAMRWYRQAPGKERELVAVI |
| (MSLN) | YGSSTYYADAVKGRFTISRDNSKNTLYLQMNSLRAEDTAVYYCNADTIGTAR |
| (SEQ ID NO: 257) | DYWGQGTLVTVSS |
| Exemplary anti-target | QVQLVESGGGVVQPGGSLRLSCAASGSTFSIRAMRWVRQAPGKGLEWVSV |
| (MSLN) | IYGSSTYYADAVKGRFTISRDNSKNTLYLQMNSLRAEDTAVYYCNADTIGTAR |
| (SEQ ID NO: 258) | DYWGQGTLVTVSS |
| Exemplary anti-target | QVQLQESGGGLVQAGGSLRLSCAASGSIFSIASMGWYRQAPGKQRELVAVI |
| (DLL3) | TSFSSTNYADSVKGRFTISRDNAKNTVYLQMNSLKPEDTGVYYCNARYFERT |
| (SEQ ID NO: 306) | DWGQGTQVTVSS |
| Exemplary anti-target | QVQLQESGGGLVQAGGSLRLSCAAPGSIFSIASMGWYRQAPGKQRELVAVI |
| (DLL3) | TSFSSTNYADSVKGRFTISRDNAKNTVYLQMNSLKPEDTGVYYCNARYFERT |
| (SEQ ID NO: 307) | DWGQGTQVTVSS |
| Exemplary anti-target | QVQLQESGGGLVQAGGSLRLSCAASGSIFSIASMAWYRQAPGKQRELVAAI |
| (DLL3) | TSFSSTNYADSVKGRFTISRDNAKNTVYLQMNSLKPEDTGVYYCNARYFERT |
| (SEQ ID NO: 308) | DWGQGTQVTVSS |
| Exemplary anti-target | QVQLQESGGGLVQAGGSLRLSCAASESIFSINVMAWHRQAPGKQRELVARI |
| (DLL3) | TSGGSTNYADSVKGRFTISRDNAKNTVYLQMNSLKPEDTGVYYCGAYQGLY |
| (SEQ ID NO: 309) | AYWGQGTQVTVSS |
| Exemplary anti-target | QVQLQESGGGLVQAGGSLRLSCVASGSSFSITSMAWYRQAPGKQRDLVAAI |
| (DLL3) | TSFGSTNYADSVKDRFTISRDNAKNTVYLQMNSLKPEDTAVYYCNGRVFDH |
| (SEQ ID NO: 310) | VYWGQGTQVTVSS |
| Exemplary anti-target | QVQLQESGGGLVQAGGSLKLSCAASSSIFSISSMSWYRQAPGKQRELVAAIT |
| (DLL3) | TFDYTNYADSVKGRFTISRDNAKNMMYLQMNSLKPEDTAVYLCNARAFGR |
| (SEQ ID NO: 311) | DYWGQGTQVTVSS |
| Exemplary anti-target | QVQLQESGGGLVQAGGSLKLSCAASSSIFSISSMSWYRQAPGKQRELVAAIT |
| (DLL3) | SFGSTNYADSVKGRFTISRDNAKNMMYLQMNSLKPEDTAVYRCNARTMGR |
| (SEQ ID NO: 312) | DYWGQGTQVTVSS |
| Exemplary anti-target | QVQLQESGGGLVQPGGSLRLSCAASGSTLNIKIMAWHRQAPGKQRELVATL |
| (DLL3) | TSGGNTNYADSVKGRFTISRDNAKNTVYLQMNSLQPEDTAVYYCGLWDGV |
| (SEQ ID NO: 313) | GGAYWGRGTQVTVSS |
| Exemplary anti-target | QVQLQESGGGLVQPGGSLRISCAASGSTLNIKIMAWHRQAPGKQRELVATL |
| (DLL3) | TSGGNTNYADSVKGRFTISRDNAKNTVYLQMNSLQPEDTAVYYCGLWDGV |
| (SEQ ID NO: 314) | GGAYWGRGTQVTVSS |
| Exemplary anti-target | QVQLQESGGGLVQAGGSLRLSCAASGSTFNIKTMAWHRQAPGNQRELVAT |
| (DLL3) | LTSGGNTNYADSVKGRFTISRDNAKNTVYLQMNSLKPEDTAVYYCGLWNG |
| (SEQ ID NO: 315) | VGGAYWGRGTQVTVSS |
| Exemplary anti-target | QVQLQDGGGLVQPGGSLRLSCAASGSTFNIKLMAWHRQAPGNQRELVATL |
| (DLL3) | TSGGNTNYADSVKGRFTISRDNASNIVYLQMNSLKPEDTAVYYCGLWDGVG |
| (SEQ ID NO: 316) | GAYWGRGTQVTVSS |
| Exemplary anti-target | QVQLQESGGGLVQAGGSLRLSCAASGSTFNFKIMAWHRQAPGKQRELVAS |
| (DLL3) | LTSEGLTNYRDSVKGRFTISRDNAKNTVYLQMNNLKPEDTAVYYCGLWDGV |
| (SEQ ID NO: 317) | GGAYWGRGTQVTVSS |
| Exemplary anti-target | QVQLQESGGGLVQPGGSLRLSCAASGFMFSSYSMSWYRQAPGKQRELVAA |
| (DLL3) | ITTWGSTNYADSVKGRFTISRDNAKNTVWLQMNSLEPEDTAVYFCNARSW |
| (SEQ ID NO: 318) | NNYWGQGTQVTVSS |
| Exemplary anti-target | QVQLQESGGGLVQVGGSLRLSCAASGFMFSSYSMSWYRQAPGKQRELVA |
| (DLL3) | AITSYGSTNYADSVKGRFTISRDNAKNTVWLQMNSLKPEDTAVYFCNARSW |
| (SEQ ID NO: 319) | NNYWGQGTQVTVSS |
| Exemplary anti-target | QVQLQESGGGLVQPGGSLRLSCAASGFTFSSHSMSWYRQAPGKQRELVAAI |
| (DLL3) | TTYGSTNYIDSVKGRFTISRDNTKNTVYLQMNSLKPEDTAVYFCNARSWNNY |
| (SEQ ID NO: 320) | WGQGTQVTVSS |
| Exemplary anti-target | QVQLQESGGGLVQAGGSLRLSCVASGSSFSHNTMGWYRQAPGKQRDLVA |
| (DLL3) | RITTFGTTNYADSVKGRFTISRDNAKNNYLQMNSLKPEDTAVYYCNGESFG |
| (SEQ ID NO: 321) | RIWYNWGQGTQVTVSS |
| Exemplary anti-target | QVQLQESGGGLVQAGASLRLTCTASGGRFSYATMGWSRQAPGVIREMVA |
| (DLL3) | RITSSGFSTNYADSVKGRFTISRDNAKNAVYLQMDSLKPEDTAVYYCNAQHF |
| (SEQ ID NO: 322) | GTDSWGQGTQVTVSS |
| Exemplary anti-target | QVQLQESGGGLVQAGASLRLTCTASGSRFSYATMGWSRQAPGKQRELVAR |
| (DLL3) | ITSSGFSTNYADSVKGRFTISRDNAKNAVYLQMDSLKPEDTAVYYCNAQQFG |
| (SEQ ID NO: 323) | TDSWGQGTQVTVSS |
| Exemplary anti-target | QVQLQESGGGLVQAGGSLRLSCAASGSTFTSNVMGWHRQAPGKQRELVA |
| (DLL3) | NMHSGGSTNYADSVKGRFTISRDNAKNIVYLQMNNLKIEDTAVYYCRWYGI |
| (SEQ ID NO: 324) | QRAEGYWGQGTQVTVSS |
| Exemplary anti-target | QVQLQESGGGLVVAGGSLRLSCAASGSSVSFLSMAWYRQAPGKKRELVAGI |
| (DLL3) | SVDGSTNYADSVKGRFTVSRDNAKNTVYLQMNSLCIPEDTAVYYCYAYRWV |
| (SEQ ID NO: 325) | GRDTYWGQGTQVTVSS |
| Exemplary anti-target | QVQLQESGGGLVVAGGSLRLSCAASGSSVSFLSMAWYRQAPGKKRELVAGI |
| (DLL3) | SVDGSTNYADSVKGRFTISRDNAKNTVYLQMNSLQPEDTAVYYCYAYRWV |
| (SEQ ID NO: 326) | GRDTYWGQGTQVTVSS |
| Exemplary anti-target | QVQLQESGGGLVVSGGSLRLSCAASGSSVSFLSMAWYRQAPGKKRELVAGI |
| (DLL3) | SVDGSTNYADSVKGRFTISRDNAKNTVYLQMNSLQPEDTAAYYCYAYRWV |
| (SEQ ID NO: 327) | GRDTYWGQGTQVTVSS |
| Exemplary anti-target | QVQLQESGGGLVVAGGSLRLSCAASGSSVSFLSMAWYRQAPGKKRELVAGI |
| (DLL3) | SVDGSTNYADSVKGRFTISRDNAENTVYLQMNSLQPEDTAVYYCYAYRWEG |
| (SEQ ID NO: 328) | RDTYWGQGTQVTVSS |
| Exemplary anti-target | QVQLQESGGGLVVAGGSLRLSCAASGSSVSFLSMAWYRQAPGKKRELVAGI |
| (DLL3) | SVDGSTNYADSVKGRFTISRDNAENTVYLQMNSLQPEDTAVYYCYAYRWEG |
| (SEQ ID NO: 329) | RNTYWGQGTQVTVSS |
| Exemplary anti-target | QVQLQESGGGLVQPGGSLRLSCAASGSSVSFLSMAWYRQAPGKKRELVAGI |
| (DLL3) | STDGSTNYVDSVKGRFTISRDNAKNTVYLQMNSLQPEDTAVYYCYAYRWVG |
| (SEQ ID NO: 330) | RYTYWGQGTQVTVSS |
| Exemplary anti-target | QVQLQESGGGLVVAGGSLRLSCAASGSSVSFLSMAWYRQAPGKKRELVAGI |
| (DLL3) | STDGTTNYVDSVKDRFTISRDNAKNTVYLQMNSLQPEDTAAYYCYAYRWVG |
| (SEQ ID NO: 331) | RDTYWGQGTQVTVSS |
| Exemplary anti-target | QVQLQESGGGLVVAGGSLRLSCAASGSSVSFLSIAWYRQAPGKKRELVAGIS |
| (DLL3) | TDGTTNYVDSVKDRFTISRDNAKNTVYLQMNSLQPEDTAAYYCYAYRWVG |
| (SEQ ID NO: 332) | RDTYWGQGTQVTVSS |
| Exemplary anti-target | QVQLQESGGGLVQAGGSLTLSCAASGSSVSFLSMAWYRQAPGKKRELVAGI |
| (DLL3) | STDGTTNYVDSVKDRFTISRDNAKNTVYLQMNSLQPEDTAAYYCYAYRWVG |
| (SEQ ID NO: 333) | RDTYWGQGTQVTVSS |
| Exemplary anti-target | QVQLQESGGGLVQAGGSLRLSCAASGSSVSFLSMAWYRQAPGKKRELVAGI |
| (DLL3) | STDGSTNYADSVKGRFTISEGNAKNTVDLQMNSLQPEDTAVYYCYAYRWV |
| (SEQ ID NO: 334) | DRYTYWGQGTQVTVSS |
| Exemplary anti-target | QVQLQESGGGLVVAGGSLRLSCAASGSSVSFLSMAWYRQAPGKKRELVAGI |
| (DLL3) | STDGSTNYADSVKGRFTISEDNAKNIVDLQMNSLQPEDTAVYYCYAYRWID |
| (SEQ ID NO: 335) | RYTYWGQGTQVTVSS |
| Exemplary anti-target | QVQLQESGGGLVQPGGSLRLSCAASGSSVSFLSMAWYRQAPGKKRELVAGI |
| (DLL3) | STDGSTNYADSVKGRFTISEDNAKNIVDLQMNSLQPEDTAVYYCYAYRWV |
| (SEQ ID NO: 336) | DRYTYWGQGTQVTVSS |
| Exemplary anti-target | QVQLQESGGGLVVAGGSLRLSCAASGSSVSFLSMAWYRQAPGKKRELVAGI |
| (DLL3) | SSDGSTNYVDSVKGRFTISRDNAKNIVFLQMNSLQPQDTAVYYCYAYRWVG |
| (SEQ ID NO: 337) | RDTYWGQGTQVTVSS |
| Exemplary anti-target | QVQLQESGGGLVVAGGSLRLSCAASGSSVSFLSMAWYRQAPGKKRELVAGI |
| (DLL3) | SADGSTDYIDSVKGRFTISRDSANNTMYLQMNSLQPEDTAVYYCYAYRWTT |
| (SEQ ID NO: 338) | RYTYWGQGTQVTVSS |
| Exemplary anti-target | QVQLQESGGGLVQPGGSLRLSCAASGFTLDYYAIGWYRQAPGKKRELVAGI |
| (DLL3) | SSDGSTHYVDSVKGRFAISRDNAENTVYLQMNDLQPDDTAVYYCYAYRWV |
| (SEQ ID NO: 339) | GGYTYWGQGTQVTVSS |
| Exemplary anti-target | QVQLQESGGGLVQAGGSLRLSCVASGSTSSINAMGWYRRAPGKQRELVAG |
| (DLL3) | ISSDGSKNYADSVKGRFTISRDNAKNTVYLQMNSLKPEDTAVYYCYYFRTVA |
| (SEQ ID NO: 340) | ASSMQYWGQGTQVTVSS |
| Exemplary anti-target | QVQLQESGGGLVQAGGSLRLSCVASGSTSSINAMGWYRRAPGKQRELVAG |
| (DLL3) | ISSDGSKVYADSVKGRFTISRDNAKNTVYLQMNSLKPEDTAVFYCYYFRTVSG |
| (SEQ ID NO: 341) | SSMRYWGQGTQVTVSS |
| Exemplary anti-target | QVQLQESGGGLVQAGGSLRLSCAASGITSSVYSMGWYRQAPGKQRELVAG |
| (DLL3) | SSSDGSTHYVDSVRGRFTISRDNAKNTVYLQMSSLKPEDTAVYYCYANRGFA |
| (SEQ ID NO: 342) | GAPSYWGQGTQVTVSS |
| Exemplary anti-target | QVQLQESGGGLVQAGGSLRLSCAASGRTSMFNSMGWHRQAPGKQRELV |
| (DLL3) | AIIRSGGSSNYADTVKGRFTISRDNTKNTVYLQMNDLKPEDTAVYYCFYYFQS |
| (SEQ ID NO: 343) | SYWGQGTQVTVSS |
| Exemplary anti-target | QVQLQESGGGLVQAGGSLRLSCAASGRTSMVNSMGWHRQAPGKQRELV |
| (DLL3) | ALITSGGSSNYADTVKGRFTISRDNTKNTVYLQMNDLKPEDTAVYYCFYYFQS |
| (SEQ ID NO: 344) | SYWGQGTQVTVSS |
| Exemplary anti-target | QVQLQESGGGLVQAGGSLRLSCAASGSVSMFNSMGWHRQPPGKQRELVA |
| (DLL3) | IITSGGSSNYADTVKGRFTISRDNTKNTVYLQMNDLKPEDTAVYYCFYYFQSS |
| (SEQ ID NO: 344) | YWGQGTQVTVSS |
| Exemplary anti-target | QVQLQESGGGLVQAGGSLRLSCTASGSIFSIAVMGWYRQVPGKRREWVATI |
| (DLL3) | FDGSYTNYADSVKGRFTISRDNARNKVYLQMNNLKPEDTAVYYCQTHWTQ |
| (SEQ ID NO: 345) | GSVPKESWGQGTQVTVSS |
| Exemplary anti-target | QVQLQESGGGLVQAGGSLRLSCVASSGIFSDMSMVWYRQAPGKQRELVAS |
| (DLL3) | ITTFGSTNYADPVKGRFTISRDNAKNTVYLQMNSLKPEDTAVYYCSGRSYSSD |
| (SEQ ID NO: 346) | YWGRGTQVTVSS |
| Exemplary anti-target | QVQLQESGGGLVQAGGSLRLSCVASGSISSIIVMGWSRQAPGKQRESVATIT |
| (DLL3) | RDGTRNYADSLKGRFTISRDNAKNTSYLQINSLKPEDTAVYSCYARYGDINY |
| (SEQ ID NO: 347) | WGKGTQVTVSS |
| Exemplary anti-target | QVQLQESGGGLVQAGGSLRLSCVASGSISSIIVMGWSRQAPGKQRESLATIS |
| (DLL3) | RGGTRTYADSVKGRFTISRDNAKNTSYLQMNSLKPEDTAVYSCYARYGDINY |
| (SEQ ID NO: 348) | WGKGTQVTVSS |
| Exemplary anti-target | QVQLQESGGGLVQAGGSLRLSCVASGSIFTTNSMGWHRQGPGKQRELVAL |
| (DLL3) | IGSAGSTKYADSVKGRFTISRDNAKNTVSLQMDSLKPEDTAVYYCFYYDSRSY |
| (SEQ ID NO: 349) | WGQGTQVTVSS |
| Exemplary anti-target | QVQLQESGGGMVQPGGSLRLSCAASGSREISTMGWHRQAPGKQRELAARI |
| (DLL3) | TSGGITKYADSVKGRFTISRDNAKKTVYLQMNSLKSEDTAVYYCFAYDNINAY |
| (SEQ ID NO: 350) | WGQGTQVTVSS |
| Exemplary anti-target | QVQLQESGGGWVQAGGSLRLSCAASGSREISTMGWHRQAPGKQRELAAR |
| (DLL3) | ITSGGITKYADSVKGRFTISRDNAKKTVYLQMNSLKSEDTAVYYCFAYDNINA |
| (SEQ ID NO: 351) | YWGQGTQVTVSS |
| Exemplary anti-target | QVQLQESGGGWVQAGGSLRLSCTASGSREISTMGWHRQAPGKQRELAARI |
| (DLL3) | TSGGITKYADSVKGRFTISRDNAKKTVYLQMDSLKSEDTAVYYCFAYDNINAY |
| (SEQ ID NO: 352) | WGQGTQVTVSS |
| Exemplary anti-target | QVQLQESGGGSVQAGRSLGLSCAASGSREISTMGWHRQAPGKQRELAARI |
| (DLL3) | TSGGITKYADSVKGRFTISRDNAKKTVYLQMNSLKSEDTAVYYCFAYDNINAY |
| (SEQ ID NO: 353) | WGQGTQVTVSS |
| Exemplary anti-target | QVQLQESGGGLVQAGGSLRLSCTASGSIFRGAAMYWHRQAPGKQRELVAA |
| (DLL3) | ITTSGNTSYADSVKGRFTISRDNAKNTMYLQIISLKPEDTAVYYCAFWIAGKA |
| (SEQ ID NO: 354) | YWGQGTQVTVSS |
| Exemplary anti-target | QVQLQESGGGLVQPGGSLRLSCAASGSISSFNFMSWHRQAPGKERELAGVI |
| (DLL3) | TRGGATNYADSVKGRFTISRDNVKNTVYLQMNGLKPEDTAVYYCHGRSQLG |
| (SEQ ID NO: 355) | STWGQGTQVTVSS |
| Exemplary anti-target | QVQLQESGGGLVQAGGSLRLSCLASGTIFTASTMGWHRQPPGKQRELVASI |
| (DLL3) | AGDGRTNYAESTEGRFTISRDDAKNTMYLQMNSLKPEDTAVYYCYAYYLDT |
| (SEQ ID NO: 356) | YAYWGQGTQVTVSS |
| Exemplary anti-target | EVQLVESGGGLVQPGGSLTLSCAASGSIFSIASMGWYRQAPGKQRELVAVIT |
| (DLL3) | SFSSTNYADSVKGRFTISRDNAKNSVYLQMNSLRAEDTAVYYCNARYFERTD |
| (SEQ ID NO: 357) | WGQGTLVTVSS |
| Exemplary anti-target | EVQLVESGGGLVQPGGSLTLSCAASGRTSMFNSMGWHRQAPGKQRELVAI |
| (DLL3) | IRSGGSSNYADTVKGRFTISRDNAKNSVYLQMNSLRAEDTAVYYCFYYFQSSY |
| (SEQ ID NO: 358) | WGQGTLVTVSS |
| Exemplary anti-target | EVQLVESGGGLVQPGGSLTLSCAASGSSVSFLSMAWYRQAPGKKRELVAGIS |
| (DLL3) | VDGSTNYADSVKGRFTISRDNAKNSVYLQMNSLRAEDTAVYYCYAYRWVG |
| (SEQ. ID NO: 359) | RDTYWGQGTLVTVSS |
| Exemplary anti-target | EVQLVESGGGLVQPGGSLTLSCTASGSIFRGAAMYWHRQAPGKQRELVAAI |
| (DLL3) | TTSGNTSYADSVKGRFTISRDNAKNSMYLQMNSLRAEDTAVYYCAFWIAGK |
| (SEQ ID NO: 360) | AYWGQGTLVTVSS |
| Exemplary anti-target | EVQLVESGGGLVQPGGSLTLSCAASGSTFNIKTMAWHRQAPGNQRELVATL |
| (DLL3) | TSGGNTNYADSVKGRFTISRDNAKNSVYLQMNSLRAEDTAVYYCGLWNGV |
| (SEQ ID NO: 361) | GGAYWGQGTLVTVSS |
| Exemplary anti-target | EVQLVESGGGLVQPGGSLTLSCAASGSTLNIKIMAWHRQAPGKQRELVATL |
| (DLL3) | TSGGNTNYADSVKGRFTISRDNAKNSVYLQMNSLRAEDTAVYYCGLWDGV |
| (SEQ ID NO: 362) | GGAYWGQGTLVTVSS |
| Exemplary anti-target | EVQLVESGGGLVQPGGSLTLSCAASSSIFSISSMSWYRQAPGKQRELVAAITT |
| (DLL3) | FDYTNYADSVKGRFTISRDNAKNSMYLQMNSLRAEDTAVYYCNARAFGRDY |
| (SEQ ID NO: 363) | WGQGTLVTVSS |
| Exemplary anti-target | EVQLVESGGGLVQPGGSLTLSCVASGSTSSINAMGWYRRAPGKQRELVAGI |
| (DLL3) | SSDGSKNYADSVKGRFTISRDNAKNSVYLQMNSLRAEDTAVYYCYYFRTVAA |
| (SEQ ID NO: 364) | SSMQYWGQGTLVTVSS |
| Exemplary anti-target | EVQLVESGGGLVQPGGSLTLSCAASGFMFSSYSMSWYRQAPGKQRELVAAI |
| (DLL3) | TSYGSTNYADSVKGRFTISRDNAKNSVYLQMNSLRAEDTAVYYCNARSWNN |
| (SEQ ID NO: 365) | YWGQGTLVTVSS |
| Exemplary anti-target | EVQLVESGGGLVQPGGSLTLSCAASGSVSMFNSMGWHRQPPGKQRELVAI |
| (DLL3) | ITSGGSSNYADTVKGRFTISRDNAKNSVYLQMNSLRAEDTAVYYCFYYFQSSY |
| (SEQ ID NO: 366) | WGQGTLVTVSS |
| Exemplary anti-target | EVQLVESGGGLVQPGGSLTLSCTASGGRFSYATMGWSRQAPGKQREMVA |
| (DLL3) | RITSSGFSTNYADSVKGRFTISRDNAKNSVYLQMNSLRAEDTAVYYCNAQHF |
| (SEQ ID NO: 367) | GTDSWGQGTLVTVSS |
| Exemplary anti-target | EVQLVESGGGLVQPGGSLTLSCAASGSISSFNFMSWHRQAPGKERELAGVIT |
| (DLL3) | RGGATNYADSVKGRFTISRDNAKNSVYLQMNSLRAEDTAVYYCHGRSQLGS |
| (SEQ ID NO: 368) | TWGQGTLVTVSS |
| Exemplary anti-target | EVQLVESGGGLVQPGGSLTLSCAASESIFSINVMAWHRQAPGKQRELVARIT |
| (DLL3) | SGGSTNYADSVKGRFTISRDNAKNSVYLQMNSLRAEDTAVYYCGAYQGLYA |
| (SEQ ID NO: 369) | YWGQGTLVTVSS |
| Exemplary anti-target | EVQLVESGGGLVQPGGSLTLSCAASGSREISTMGWHRQAPGKQRELAARIT |
| (DLL3) | SGGITKYADSVKGRFTISRDNAKNSVYLQMNSLRAEDTAVYYCFAYDNINAY |
| (SEQ ID NO: 370) | WGQGTLVTVSS |
| Exemplary anti-target | EVQLVESGGGLVQPGGSLTLSCTASGSIFSIAVMGWYRQVPGKRREWVATI |
| (DLL3) | FDGSYTNYADSVKGRFTISRDNAKNSVYLQMNSLRAEDTAVYYCQTHWTQ |
| (SEQ ID NO: 371) | GSVPKESWGQGTLVTVSS |
| Exemplary anti-target | EVQLVESGGGLVQPGGSLTLSCVASGSTSSINAMGWYRRAPGKQRELVAGI |
| (DLL3) | SSDGSKVYADSVKGRFTISRDNAKNSVYLQMNSLRAEDTAVYYCYYFRTVSG |
| (SEQ ID NO: 372) | SSMRYWGQGTLVTVSS |
| Exemplary anti-target | EVQLVESGGGLVQPGGSLTLSCVASSGIFSDMSMVWYRQAPGKQRELVASI |
| (DLL3) | TTFGSTNYADPVKGRFTISRDNAKNSVYLQMNSLRAEDTAVYYCSGRSYSSD |
| (SEQ ID NO: 373) | YWGQGTLVTVSS |
| Exemplary anti-target | EVQLVESGGGLVQPGGSLTLSCAASGFMFSSYSMSWYRQAPGKQRELVAAI |
| (DLL3) | TTWGSTNYADSVKGRFTISRDNAKNSVYLQMNSLRAEDTAVYYCNARSWN |
| (SEQ ID NO: 374) | NYWGQGTLVTVSS |
| Exemplary anti-target | EVQLVESGGGLVQPGGSLTLSCTASGSRFSYATMGWSRQAPGKQRELVARI |
| (DLL3) | TSSGFSTNYADSVKGRFTISRDNAKNSVYLQMNSLRAEDTAVYYCNAQQFG |
| (SEQ ID NO: 375) | TDSWGQGTLVTVSS |
| Exemplary anti-target | EVQLVESGGGLVQPGGSLTLSCAASGSTFTSNVMGWHRQAPGKQRELVAN |
| (DLL3) | MHSGGSTNYADSVKGRFTISRDNAKNSVYLQMNSLRAEDTAVYYCRWYGI |
| (SEQ ID NO: 376) | QRAEGYWGQGTLVTVSS |
| Exemplary anti-target | EVQLVESGGGLVQPGGSLTLSCAASGSSVSFLSMAWYRQAPGKKRELVAGIS |
| (DLL3) | TDGSTNYVDSVKGRFTISRDNAKNSVYLQMNSLRAEDTAVYYCYAYRWVGR |
| (SEQ ID NO: 377) | YTYWGQGTLVTVSS |
| Exemplary anti-target | EVQLVESGGGLVQPGGSLTLSCVASGSISSIIVMGWSRQAPGKQRESVATIT |
| (DLL3) | RDGTRNYADSLKGRFTISRDNAKNSSYLQMNSLRAEDTAVYYCYARYGDINY |
| (SEQ ID NO: 378) | WGQGTLVTVSS |
| Exemplary anti-target | EVQLVESGGGLVQPGGSLTLSCAASGSSVSFLSMAWYRQAPGKKRELVAGIS |
| (DLL3) | ADGSTDYIDSVKGRFTISRDNAKNSVYLQMNSLRAEDTAVYYCYAYRWTTRY |
| (SEQ ID NO: 379) | TYWGQGTLVTVSS |
| Exemplary anti-target | EVQLVESGGGLVQPGGSLTLSCLASGTIFTASTMGWHRQPPGKQRELVASIA |
| (DLL3) | GDGRTNYAESTEGRFTISRDNAKNSMYLQMNSLRAEDTAVYYCYAYYLDTY |
| (SEQ ID NO: 380) | AYWGQGTLVTVSS |
| Exemplary anti-target | EVQLVESGGGLVQPGGSLTLSCAASGSSVSFLSMAWYRQAPGKKRELVAGIS |
| (DLL3) | VDGSTNYADSVKGRFTISRDNAKNSVYLQMNSLRAEDTAVYYCYAYRWEGR |
| (SEQ ID NO: 381) | NTYWGQGTLVTVSS |
| Exemplary anti-target | EVQLVESGGGLVQPGGSLTLSCVASGSSFSHNTMGWYRQAPGKQRDLVAR |
| (DLL3) | ITTFGTTNYADSVKGRFTISRDNAKNSVYLQMNSLRAEDTAVYYCNGESFGRI |
| (SEQ ID NO: 382) | WYNWGQGTLVTVSS |
| Exemplary anti-target | EVQLVESGGGLVQPGGSLTLSCVASGSISSIIVMGWSRQAPGKQRESLATISR |
| (DLL3) | GGTRTYADSVKGRFTISRDNAKNSSYLQMNSLRAEDTAVYYCYARYGDINY |
| (SEQ ID NO: 383) | WGQGTLVTVSS |
| Exemplary anti-target | EVQLVESGGGLVQPGGSLTLSCVASGSSFSITSMAWYRQAPGKQRDLVAAIT |
| (DLL3) | SFGSTNYADSVKDRFTISRDNAKNSVYLQMNSLRAEDTAVYYCNGRVFDHV |
| (SEQ ID NO: 384) | YWGQGTLVTVSS |
| Exemplary anti-target | EVQLVESGGGLVQPGGSLTLSCAASGRTSMVNSMGWHRQAPGKQRELVA |
| (DLL3) | LITSGGSSNYADTVKGRFTISRDNAKNSVYLQMNSLRAEDTAVYYCFYYFQSS |
| (SEQ ID NO: 385) | YWGQGTLVTVSS |
| Exemplary anti-target | EVQLVESGGGLVQPGGSLTLSCAASGSTFNFKIMAWHRQAPGKQRELVASL |
| (DLL3) | TSEGLTNYRDSVKGRFTISRDNAKNSVYLQMNSLRAEDTAVYYCGLWDGVG |
| (SEQ ID NO: 386) | GAYWGQGTLVTVSS |
| Exemplary anti-target | EVQLVESGGGLVQPGGSLTLSCAASGFTLDYYAIGWYRQAPGKKRELVAGIS |
| (DLL3) | SDGSTHYVDSVKGRFTISRDNAKNSVYLQMNSLRAEDTAVYYCYAYRWVGG |
| (SEQ ID NO: 387) | YTYWGQGTLVTVSS |
| Exemplary anti-target | EVQLVESGGGLVQPGGSLTLSCVASGSIFTTNSMGWHRQGPGKQRELVALI |
| (DLL3) | GSAGSTKYADSVKGRFTISRDNAKNSVYLQMNSLRAEDTAVYYCFYYDSRSY |
| (SEQ ID NO: 388) | WGQGTLVTVSS |
| Exemplary anti-target | EVQLVESGGGLVQPGGSLTLSCAASGITSSVYSMGWYRQAPGKQRELVAGS |
| (DLL3) | SSDGSTHYVDSVRGRFTISRDNAKNSVYLQMNSLRAEDTAVYYCYANRGFA |
| (SEQ ID NO: 389) | GAPSYWGQGTLVTVSS |
| Exemplary anti-target | EVQLVESGGGLVQPGGSLTLSCAASSSIFSISSMSWYRQAPGKQRELVAAITS |
| (DLL3) | FGSTNYADSVKGRFTISRDNAKNSMYLQMNSLRAEDTAVYYCNARTMGRD |
| (SEQ ID NO: 390) | YWGQGTLVTVSS |
| Exemplary anti-target | EVQLVESGGGLVQPGGSLTLSCVASGFTSSINAMGWYRRAPGKQRELVAGI |
| (DLL3) | SSDGSFVYADSVKGRFTISRDNAKNSVYLQMNSLRAEDTAVYYCYYFRHVSG |
| (SEQ ID NO: 391) | SSMRYWGQGTLVTVSS |
| Exemplary anti-target | EVQLVESGGGLVQPGGSLTLSCVASGSTSSINAMAWYRRAPGKQRELVAGI |
| (DLL3) | SSDGSKVYADSVKGRFTISRDNAKNSVYLQMNSLRAEDTAVYYCYYFRTVSG |
| (SEQ ID NO: 392) | SSSRYWGQGTLVTVSS |
| Exemplary anti-target | EVQLVESGGGLVQPGGSLTLSCVASGSTSSINAMGWYRRAPGKQRELVAGI |
| (DLL3) | SSDGSKVYEDSVKGRFTISRDNAKNSVYLQMNSLRAEDTAVYYCYYFRTVSG |
| (SEQ ID NO: 393) | SSMRYWGQGTLVTVSS |
| Exemplary anti-target | EVQLVESGGGLVQPGGSLTLSCVASGSPSSINAMGWYRRAPGKQRELSAGI |
| (DLL3) | SSDGSKVYADSVKGRFTISRDNAKNSVYLQMNSLRAEDTAVYYCYYFRTVRG |
| (SEQ ID NO: 394) | SSMSYWGQGTLVTVSS |
| Exemplary anti-target | EVQLVESGGGLVQPGGSLTLSCVASGSTSSINAMGWYRRAPGKQRELAAGI |
| (DLL3) | SSDGSSVYADSVKGRFTISRDNAKNSVYLQMNSLRAEDTAVYYCYYFRTVSG |
| (SEQ ID NO: 395) | SSKRYWGQGTLVTVSS |
| Exemplary anti-target | EVQLVESGGGLVQPGGSLTLSCVASGSISSINAMGWYRRAPGKQRELVAGIS |
| (DLL3) | SDGSKVYADSVKGRFTISRDNAKNSVYLQMNSLRAEDTAVYYCYYFRMVSG |
| (SEQ ID NO: 396) | SSMRYWGQGTLVTVSS |
| Exemplary anti-target | EVQLVESGGGLVQPGGSLTLSCVASGSTSSINAMAWYRRAPGKQRELVAGI |
| (DLL3) | SSDGSKLYADSVKGRFTISRDNAKNSVYLQMNSLRAEDTAVYYCYYFRTVQG |
| (SEQ ID NO: 397) | SSMRYWGQGTLVTVSS |
| Exemplary anti-target | EVQLVESGGGLVQPGGSLTLSCVASGSTSSINAYGWYRRAPGKQRELVAGIS |
| (DLL3) | SDGSKVYADSVKGRFTISRDNAKNSVYLQMNSLRAEDTAVYYCYYFRTVYGS |
| (SEQ ID NO: 398) | SMRYWGQGTLVTVSS |
| Exemplary anti-target | EVQLVESGGGLVQPGGSLTLSCVASGSTSSINAIGWYRRAPGKQRELVAGISS |
| (DLL3) | DGSKVYIDSVKGRFTISRDNAKNSVYLQMNSLRAEDTAVYYCYYFRTVSGSSY |
| (SEQ ID NO: 399) | RYWGQGTLVTVSS |
| Exemplary anti-target | EVQLVESGGGLVQPGGSLTLSCVASGSTSSINAMAWYRRAPGKQRELVAGI |
| (DLL3) | SSDGSKVYSDSVKGRFTISRDNAKNSVYLQMNSLRAEDTAVYYCYYFRTVLG |
| (SEQ ID NO: 400) | SSMRYWGQGTLVTVSS |
| Exemplary anti-target | EVQLVESGGGLVQPGGSLTLSCVASGSTSIINAMGWYRRAPGKQRELAAGIS |
| (DLL3) | SDGSKVIADSVKGRFTISRDNAKNSVYLQMNSLRAEDTAVYYCYYFRRVSGS |
| (SEQ ID NO: 401) | SMRYWGQGTLVTVSS |
| Exemplary anti-target | EVQLVESGGGLVQPGGSLTLSCVASGSTSSINAMGWYRRAPGKQRELVAGI |
| (DLL3) | SSDGSKIYADSVKGRFTISRDNAKNSVYLQMNSLRAEDTAVYYCYYFRTVSGS |
| (SEQ ID NO: 402) | SMRYWGQGTLVTVSS |
| Exemplary anti-target | EVQLVESGGGLVQPGGSLTLSCVASGKTSSINAMAWYRRAPGKQRELVAGI |
| (DLL3) | SSDGSKVYTDSVKGRFTISRDNAKNSVYLQMNSLRAEDTAVYYCYYFRTVSG |
| (SEQ ID NO: 403) | SSARYWGQGTLVTVSS |
| Exemplary anti-target | EVQLVESGGGLVQPGGSLTLSCVASGTTSSINAMGWYRRAPGKQRELVAGI |
| (DLL3) | SSDGSLVYADSVKGRFTISRDNAKNSVYLQMNSLRAEDTAVYYCYYFRIVRGS |
| (SEQ ID NO: 404) | SMRYWGQGTLVTVSS |
| Exemplary anti-target | EVQLVESGGGLVQPGGSLTLSCVASGSTSSINAMAWYRRAPGKQRELVAGI |
| (DLL3) | SSDGSKVYADSVKGRFTISRDNAKNSVYLQMNSLRAEDTAVYYCYYYRTVSG |
| (SEQ ID NO: 405) | SSMRYWGQGTLVTVSS |
| Exemplary anti-target | EVQLVESGGGLVQPGGSLTLSCVASGSGSSINAMGWYRRAPGKQRELVAGI |
| (DLL3) | SSDGSKVYSDSVKGRFTISRDNAKNSVYLQMNSLRAEDTAVYYCYYFRHVSG |
| (SEQ ID NO: 406) | SSMRYWGQGTLVTVSS |
| Exemplary anti-target | EVQLVESGGGLVQPGGSLTLSCVASGTTSSINAMGWYRRAPGKQRELVAGI |
| (DLL3) | SSDGSKVYVDSVKGRFTISRDNAKNSVYLQMNSLRAEDTAVYYCYYFRFVSG |
| (SEQ ID NO: 407) | SSMRYWGQGTLVTVSS |
| Exemplary anti-target | EVQLVESGGGLVQPGGSLTLSCVASGSTSSINAMAWYRRAPGKQRELVAGI |
| (DLL3) | SSDGSKVYVDSVKGRFTISRDNAKNSVYLQMNSLRAEDTAVYYCYYFRTVSG |
| (SEQ ID NO: 408) | SSMRYWGQGTLVTVSS |
| Exemplary anti-target | EVQLVESGGGLVQPGGSLTLSCVASGSTSRINAMGWYRRAPGKQRELVAGI |
| (DLL3) | SSDGSKVYADSVKGRFTISRDNAKNSVYLQMNSLRAEDTAVYYCYYFRTKSG |
| (SEQ ID NO: 409) | SSMRYWGQGTLVTVSS |
| Exemplary anti-target | EVQLVESGGGLVQPGGSLTLSCVASGSTSRINAMGWYRRAPGKQRELVAGI |
| (DLL3) | SSDGSKVYADSVKGRFTISRDNAKNSVYLQMNSLRAEDTAVYYCYYFRTVYG |
| (SEQ ID NO: 410) | SSMRYWGQGTLVTVSS |
| Exemplary anti-target | EVQLVESGGGLVQPGGSLTLSCVASGSTSSINAMGWYRRAPGKQRELVAGI |
| (DLL3) | SSDGSKVYRDSVKGRFTISRDNAKNSVYLQMNSLRAEDTAVYYCYYFRTVSG |
| (SEQ ID NO: 411) | SSMGYWGQGTLVTVSS |
| Exemplary anti-target | EVQLVESGGGLVQPGGSLTLSCVASGSTSSINAMAWYRRAPGKQRELVAGI |
| (DLL3) | SSDGSKVYSDSVKGRFTISRDNAKNSVYLQMNSLRAEDTAVYYCYYFRTVSG |
| (SEQ ID NO: 412) | SSMRSWGQGTLVTVSS |
| Exemplary anti-target | EVQLVESGGGLVQPGGSLTLSCVASGSTSSINAMAWYRRAPGKQRELVAGI |
| (DLL3) | SSDNSKVYADSVKGRFTISRDNAKNSVYLQMNSLRAEDTAVYYCYYFRTVGG |
| (SEQ ID NO: 413) | SSMRYWGQGTLVTVSS |
| Exemplary anti-target | EVQLVESGGGLVQPGGSLTLSCVASGNTSSINAMAWYRRAPGKQRELVAGI |
| (DLL3) | SSDGSKVYADSVKGRFTISRDNAKNSVYLQMNSLRAEDTAVYYCYYFRTVSG |
| (SEQ ID NO: 414) | SSMRYWGQGTLVTVSS |
| Exemplary anti-target | EVQLVESGGGLVQPGGSLTLSCVASGSTSSINAMAWYRRAPGKQRELVAGI |
| (DLL3) | SSDGSKVYADSVKGRFTISRDNAKNSVYLQMNSLRAEDTAVYYCYYFRTVSG |
| (SEQ ID NO: 415) | SHMRYWGQGTLVTVSS |
| Exemplary anti-target | EVQLVESGGGLVQPGGSLTLSCVASGSTSIINAMGWYRRAPGKQRELVAGIS |
| (DLL3) | SDGSKVYEDSVKGRFTISRDNAKNSVYLQMNSLRAEDTAVYYCYYFRAVSGS |
| (SEQ ID NO: 416) | SMRYWGQGTLVTVSS |
| Exemplary anti-target | EVQLVESGGGLVQPGGSLTLSCVASGSTSSINAMAWYRRAPGKQRELVAGI |
| (DLL3) | SSDGSKVYADSVKGRFTISRDNAKNSVYLQMNSLRAEDTAVYYCYYFRTVSG |
| (SEQ ID NO: 417) | SSMRYWGQGTLVTVSS |
| Exemplary anti-target | EVQLVESGGGLVQPGGSLTLSCVASGSTSRINAMGWYRRAPGKQRELPAGI |
| (DLL3) | SSDGSKVYAVSVKGRFTISRDNAKNSVYLQMNSLRAEDTAVYYCYYFRTVSG |
| (SEQ ID NO: 418) | SPMRYWGQGTLVTVSS |
| Exemplary anti-target | EVQLVESGGGLVQPGGSLTLSCVASGSTSRINAMGWYRRAPGKQRELVAG |
| (DLL3) | VSSDGSKVYADSVKGRFTISRDNAKNSVYLQMNSLRAEDTAVYYCYYFRTVS |
| (SEQ ID NO: 419) | GSSMSYWGQGTLVTVSS |
| Exemplary anti-target | EVQLVESGGGLVQPGGSLTLSCVASGTTSSINAMGWYRRAPGKQRELVAGI |
| (DLL3) | SSDGSKVYEDSVKGRFTISRDNAKNSVYLQMNSLRAEDTAVYYCYYFRTVSG |
| (SEQ ID NO: 420) | SSMRYWGQGTLVTVSS |
| Exemplary anti-target | EVQLVESGGGLVQPGGSLTLSCVASGITSSINAMGWYRRAPGKQRELVAGIS |
| (DLL3) | SDGSKVYAGSVKGRFTISRDNAKNSVYLQMNSLRAEDTAVYYCYYFRTVRGS |
| (SEQ ID NO: 421) | SMRYWGQGTLVTVSS |
| Exemplary anti-target | EVQLVESGGGLVQPGGSLTLSCVASGSTSDINAMGWYRRAPGKQRELVAGI |
| (DLL3) | SSDKSKVYADSVKGRFTISRDNAKNSVYLQMNSLRAEDTAVYYCYYFRTVRG |
| (SEQ ID NO: 422) | SSMRYWGQGTLVTVSS |
| Exemplary anti-target | EVQLVESGGGLVQPGGSLTLSCVASGSTSSINAMAWYRRAPGKQRELVAGI |
| (DLL3) | SSNGSKVYADSVKGRFTISRDNAKNSVYLQMNSLRAEDTAVYYCYYFRQVSG |
| (SEQ ID NO: 423) | SSMRYWGQGTLVTVSS |
| Exemplary anti-target | EVQLVESGGGLVQPGGSLTLSCVASGSTSSINAIGWYRRAPGKQRELVAGISS |
| (DLL3) | DGSKVLADSVKGRFTISRDNAKNSVYLQMNSLRAEDTAVYYCYYFRIVSGSS |
| (SEQ ID NO: 424) | MGYWGQGTLVTVSS |
| Exemplary anti-target | EVQLVESGGGLVQPGGSLTLSCVASGSTSSKNAMGWYRRAPGKQRELVAGI |
| (DLL3) | SSDGSKVYADSVKGRFTISRDNAKNSVYLQMNSLRAEDTAVYYCYYFRTVSG |
| (SEQ ID NO: 425) | ASMRYWGQGTLVTVSS |
| Exemplary anti-target | EVQLVESGGGLVQPGGSLTLSCVASGSTSSINAMGWYRRAPGKQRELVAGI |
| (DLL3) | SSDNSKVYADSVKGRFTISRDNAKNSVYLQMNSLRAEDTAVYYCYYFRTVHG |
| (SEQ ID NO: 426) | SSMRYWGQGTLVTVSS |
| Exemplary anti-target | EVQLVESGGGLVQPGGSLTLSCVASGLTSSINAMGWYRRAPGKQRELVAGI |
| (DLL3) | SSDGSKVYADSVKGRFTISRDNAKNSVYLQMNSLRAEDTAVYYCYYFRMVS |
| (SEQ ID NO: 427) | GSSMRYWGQGTLVTVSS |
| Exemplary anti-target | EVQLVESGGGLVQPGGSLTLSCVASGSTSSINAMAWYRRAPGKQRELVAGI |
| (DLL3) | SSDGSKVYTDSVKGRFTISRDNAKNSVYLQMNSLRAEDTAVYYCYYFRTISGS |
| (SEQ ID NO: 428) | SMRYWGQGTLVTVSS |
| Exemplary anti-target | EVQLVESGGGLVQPGGSLTLSCVASGSTSSNNAMAWYRRAPGKQRELVAGI |
| (DLL3) | SSDGSKVYTDSVKGRFTISRDNAKNSVYLQMNSLRAEDTAVYYCYYFRTRSG |
| (SEQ ID NO: 429) | SSMRYWGQGTLVTVSS |
| Exemplary anti-target | EVQLVESGGGLVQPGGSLTLSCVASGSTSSINAMAWYRRAPGKQRELVAGI |
| (DLL3) | SSDNSKVYADSVKGRFTISRDNAKNSVYLQMNSLRAEDTAVYYCYYFRTVSG |
| (SEQ ID NO: 430) | HSMRYWGQGTLVTVSS |
| Exemplary anti-target | EVQLVESGGGLVQPGGSLTLSCVASGSTSHINAMGWYRRAPGKQRELVAGI |
| (DLL3) | SSDGSRVYADSVKGRFTISRDNAKNSVYLQMNSLRAEDTAVYYCYYFRTVSG |
| (SEQ ID NO: 431) | GSMRYWGQGTLVTVSS |
| Exemplary anti-target | EVQLVESGGGLVQPGGSLTLSCVASGQTSSINAMGWYRRAPGKQRELVAGI |
| (DLL3) | SSDGSQVYADSVKGRFTISRDNAKNSVYLQMNSLRAEDTAVYYCYYFRTKSG |
| (SEQ ID NO: 432) | SSMRYWGQGTLVTVSS |
| Exemplary anti-target | EVQLVESGGGLVQPGGSLTLSCVASGSTSRINGMGWYRRAPGKQRELPAGI |
| (DLL3) | SSDGSKAYADSVKGRFTISRDNAKNSVYLQMNSLRAEDTAVYYCYYFRTASG |
| (SEQ ID NO: 433) | TSMRYWGQGTLVTVSS |
| Exemplary anti-target | EVQLVESGGGLVQPGGSLTLSCVASGSTSVINAMAWYRRAPGKQRELAAGI |
| (DLL3) | SSDGSKVYAKSAKGRFTISRDNAKNSVYLQMNSLRAEDTAVYYCYYFNTVSG |
| (SEQ ID NO: 434) | SSMRYWGQGTLVTVSS |
| Exemplary anti-target | EVQLVESGGGLVQPGGSLTLSCVASGSTSSINAMAWYRRAPGKQRELVAGI |
| (DLL3) | SSDGSKVYNDSVKGRFTISRDNAKNSVYLQMNSLRAEDTAVYYCYYFRTVRG |
| (SEQ ID NO: 435) | SSQRYWGQGTLVTVSS |
| Exemplary anti-target | EVQLVESGGGLVQPGGSLTLSCVASGKTSSINAMGWYRRAPGKQRELVAGI |
| (DLL3) | SSDGSKVIADSVKGRFTISRDNAKNSVYLQMNSLRAEDTAVYYCYYFRTVLGS |
| (SEQ ID NO: 436) | SMRYWGQGTLVTVSS |
| Exemplary anti-target | EVQLVESGGGLVQPGGSLTLSCVASGSTSSINAMAWYRRAPGKQRELVAGI |
| (DLL3) | SSDGSKVYTDSVKGRFTISRDNAKNSVYLQMNSLRAEDTAVYYCYYFRTRSG |
| (SEQ ID NO: 437) | SSMRYWGQGTLVTVSS |
| Exemplary anti-target | EVQLVESGGGLVQPGGSLTLSCVASGSVSSINAMGWYRRAPGKQRELVAGI |
| (DLL3) | SSDGSKVYIDSVKGRFTISRDNAKNSVYLQMNSLRAEDTAVYYCYYFRTVSGL |
| (SEQ ID NO: 438) | SMRYWGQGTLVTVSS |
| Exemplary anti-target | EVQLVESGGGLVQPGGSLTLSCVASGNTSSINAMGWYRRAPGKQRELVAGI |
| (DLL3) | SSDGSKVYYDSVKGRFTISRDNAKNSVYLQMNSLRAEDTAVYYCYYFRTVRG |
| (SEQ ID NO: 439) | SSQRYWGQGTLVTVSS |
| Exemplary anti-target | EVQLVESGGGLVQPGGSLTLSCVASGSTSSTNAMGWYRRAPGKQRELVAGI |
| (DLL3) | SSDGSKVYVDSVKGRFTISRDNAKNSVYLQMNSLRAEDTAVYYCYYFRTVSG |
| (SEQ ID NO: 440) | SSMVYWGQGTLVTVSS |
| Exemplary anti-target | EVQLVESGGGLVQPGGSLTLSCVASGSTSSINAMGWYRRAPGKQRELVAGI |
| (DLL3) | SSDGSKVYGDSVKGRFTISRDNAKNSVYLQMNSLRAEDTAVYYCYYFRTVSR |
| (SEQ ID NO: 441) | SSMRYWGQGTLVTVSS |
| Exemplary anti-target | EVQLVESGGGLVQPGGSLTLSCVASGSTSSINAMAWYRRAPGKQRELAAGI |
| (DLL3) | SSDQSKVYADSAKGRFTISRDNAKNSVYLQMNSLRAEDTAVYYCYYFRTVSG |
| (SEQ ID NO: 442) | SSMSYWGQGTLVTVSS |
| Exemplary anti-target | EVQLVESGGGLVQPGGSLTLSCVASGGTSSINAMGWYRRAPGKQRELVAGI |
| (DLL3) | SSDGSKVYSDSVKGRFTISRDNAKNSVYLQMNSLRAEDTAVYYCYYFRTVSG |
| (SEQ ID NO: 443) | SSARYWGQGTLVTVSS |
| Exemplary anti-target | EVQLVESGGGLVQPGGSLTLSCVASGSTRSINAMGWYRRAPGKQRELVAGI |
| (DLL3) | SSDGSKVYADSVKGRFTISRDNAKNSVYLQMNSLRAEDTAVYYCYYFHTVSG |
| (SEQ ID NO: 444) | SSMRYWGQGTLVTVSS |
| Exemplary anti-target | EVQLVESGGGLVQPGGSLTLSCVASGTTSSINAMGWYRRAPGKQRELVAGI |
| (DLL3) | SSDGSKVIADSVKGRFTISRDNAKNSVYLQMNSLRAEDTAVYYCYYFRTVLGS |
| (SEQ ID NO: 445) | SMRYWGQGTLVTVSS |
| Exemplary anti-target | EVQLVESGGGLVQPGGSLTLSCVASGSTSSINAMGWYRRAPGKQRELVAGI |
| (DLL3) | SSDGSKVDADSVKGRFTISRDNAKNSVYLQMNSLRAEDTAVYYCYYFRTVSG |
| (SEQ ID NO: 446) | SSMRYWGQGTLVTVSS |
| Exemplary anti-target | EVQLVESGGGLVQPGGSLTLSCVASGSTSSINAMAWYRRAPGKQRELVAGI |
| (DLL3) | SSDGSKVYKDSVKGRFTISRDNAKNSVYLQMNSLRAEDTAVYYCYYFRNVSG |
| (SEQ ID NO: 447) | SSMRYWGQGTLVTVSS |
| Exemplary anti-target | EVQLVESGGGLVQPGGSLTLSCVASGNTSSINAMGWYRRAPGKQRELVAGI |
| (DLL3) | SSNGSKVYADSVKGRFTISRDNAKNSVYLQMNSLRAEDTAVYYCYYFRTVTG |
| (SEQ ID NO: 448) | SSMRYWGQGTLVTVSS |
| Exemplary anti-target | EVQLVESGGGLVQPGGSLTLSCVASGSTSRINAMGWYRRAPGKQRELVAGI |
| (DLL3) | SSDGSKVYKDSVKGRFTISRDNAKNSVYLQMNSLRAEDTAVYYCYYFRTVSG |
| (SEQ ID NO: 449) | SSMRYWGQGTLVTVSS |
| Exemplary anti-target | EVQLVESGGGLVQPGGSLTLSCVASGSTSSINAIGWYRRAPGKQRELVAGISS |
| (DLL3) | DGSKVYADSVKGRFTISRDNAKNSVYLQMNSLRAEDTAVYYCYYFRTVKGSS |
| (SEQ ID NO: 450) | MRYWGQGTLVTVSS |
| Exemplary anti-target | EVQLVESGGGLVQPGGSLTLSCVASGLTSSINAMGWYRRAPGKQRELVAGI |
| (DLL3) | SSDGSKVYQDSVKGRFTISRDNAKNSVYLQMNSLRAEDTAVYYCYYFRTNSG |
| (SEQ ID NO: 451) | SSMRYWGQGTLVTVSS |
| Exemplary anti-target | EVQLVESGGGLVQPGGSLTLSCVASGSTSSINAMAWYRRAPGKQRELVAGI |
| (DLL3) | SSDGSKVYAESVKGRFTISRDNAKNSVYLQMNSLRAEDTAVYYCYYFRTVSG |
| (SEQ ID NO: 452) | ASMRYWGQGTLVTVSS |
| Exemplary anti-target | EVQLVESGGGLVQPGGSLTLSCVASGSTSSTNAMGWYRRAPGKQRELVAGI |
| (DLL3) | SSDGSKVLADSVKGRFTISRDNAKNSVYLQMNSLRAEDTAVYYCYYFRTVNL |
| (SEQ ID NO: 453) | SSMRYWGQGTLVTVSS |
| Exemplary anti-target | EVQLVESGGGLVQPGGSLTLSCVASGSTSSINAIGWYRRAPGKQRELVAGISS |
| (DLL3) | DGSKYYADSVKGRFTISRDNAKNSVYLQMNSLRAEDTAVYYCYYFRTVTGSS |
| (SEQ ID NO: 454) | MRYWGQGTLVTVSS |
| Exemplary anti-target | EVQLVESGGGLVQPGGSLTLSCVASGSTSSINAIGWYRRAPGKQRELVAGISS |
| (DLL3) | DGSKVYAVSVKGRFTISRDNAKNSVYLQMNSLRAEDTAVYYCYYFRKVSGSS |
| (SEQ ID NO: 455) | ARYWGQGTLVTVSS |
| Exemplary anti-target | EVQLVESGGGLVQPGGSLTLSCVASGSTSSINAMGWYRRAPGKQRELVAGI |
| (DLL3) | SSDGSKVVADSVKGRFTISRDNAKNSVYLQMNSLRAEDTAVYYCYYFRTYSG |
| (SEQ ID NO: 456) | SSMRYWGQGTLVTVSS |
| Exemplary anti-target | EVQLVESGGGLVQPGGSLTLSCVASGSTSSINAMGWYRRAPGKQRELVAGI |
| (DLL3) | SSDGSKVYADSVKGRFTISRDNAKNSVYLQMNSLRAEDTAVYYCYYFRTVSK |
| (SEQ ID NO: 457) | SSMRYWGQGTLVTVSS |
| Exemplary anti-target | EVQLVESGGGLVQPGGSLTLSCVASGSTSSINAMAWYRRAPGKQRELVAGI |
| (DLL3) | SSDGSKVYADSVKGRFTISRDNAKNSVYLQMNSLRAEDTAVYYCYYFKTVSG |
| (SEQ ID NO: 458) | SSMRYWGQGTLVTVSS |
| Exemplary anti-target | EVQLVESGGGLVQPGGSLTLSCVASGSTSSINAMAWYRRAPGKQRELAAGI |
| (DLL3) | SSDNSKVYADSVKGRFTISRDNAKNSVYLQMNSLRAEDTAVYYCYYFRTRSG |
| (SEQ ID NO: 459) | SSMRYWGQGTLVTVSS |
| Exemplary anti-target | EVQLVESGGGLVQPGGSLTLSCVASGSKSSINAMGWYRRAPGKQRELAAGI |
| (DLL3) | SSDGSKVYAQSVKGRFTISRDNAKNSVYLQMNSLRAEDTAVYYCYYFRTSSG |
| (SEQ ID NO: 460) | SSMRYWGQGTLVTVSS |
| Exemplary anti-target | EVQLVESGGGLVQPGGSLTLSCVASGTTSSINAMGWYRRAPGKQRELVAGI |
| (DLL3) | SSDGSKVYVDSVKGRFTISRDNAKNSVYLQMNSLRAEDTAVYYCYYFRFLSG |
| (SEQ ID NO: 461) | SSMRYWGQGTLVTVSS |
| Exemplary anti-target | EVQLVESGGGLVQPGGSLTLSCVASGSTSSINAFGWYRRAPGKQRELVAGIS |
| (DLL3) | SDGSKVYSDSVKGRFTISRDNAKNSVYLQMNSLRAEDTAVYYCYYFRTVSGS |
| (SEQ ID NO: 462) | SMRYWGQGTLVTVSS |
| Exemplary anti-target | EVQLVESGGGLVQPGGSLTLSCVASGSTFSINAMGWYRRAPGKQRELVAGI |
| (DLL3) | SSDGSKVLADSVKGRFTISRDNAKNSVYLQMNSLRAEDTAVYYCYYFRLVSG |
| (SEQ ID NO: 463) | SSMRYWGQGTLVTVSS |
| Exemplary anti-target | EVQLVESGGGLVQPGGSLTLSCVASGSTRSINAMGWYRRAPGKQRELVAGI |
| (DLL3) | SSDGSKVYNDSVKGRFTISRDNAKNSVYLQMNSLRAEDTAVYYCYYFRTVSG |
| (SEQ ID NO: 464) | SSMRFWGQGTLVTVSS |
| Exemplary anti-target | EVQLVESGGGLVQPGGSLTLSCVASGSTSSINAIGWYRRAPGKQRELVAGISS |
| (DLL3) | DGSKVYNDSVKGRFTISRDNAKNSVYLQMNSLRAEDTAVYYCYYFRTQSGSS |
| (SEQ ID NO: 465) | MRYWGQGTLVTVSS |
| Exemplary anti-target | EVQLVESGGGLVQPGGSLTLSCVASGSTSSINAMGWYRRAPGKQRELVAGI |
| (DLL3) | SSDGSKVYVDSVKGRFTISRDNAKNSVYLQMNSLRAEDTAVYYCYYFRTVSG |
| (SEQ ID NO: 466) | SSMPYWGQGTLVTVSS |
| Exemplary anti-target | EVQLVESGGGLVQPGGSLTLSCVASGSTSSINAMGWYRRAPGKQRELVAGI |
| (DLL3) | SSDGSKVVADSVKGRFTISRDNAKNSVYLQMNSLRAEDTAVYYCYYFRTLSG |
| (SEQ ID NO: 467) | SSMRYWGQGTLVTVSS |
| Exemplary anti-target | EVQLVESGGGLVQPGGSLTLSCVASGTTSSINAMGWYRRAPGKQRELVAGI |
| (DLL3) | SSDGSKVYGDSVKGRFTISRDNAKNSVYLQMNSLRAEDTAVYYCYYFRTVSG |
| (SEQ ID NO: 468) | SAMRYWGQGTLVTVSS |
| Exemplary anti-target | EVQLVESGGGLVQPGGSLTLSCVASGSTSSINAMAWYRRAPGKQRELVAGI |
| (DLL3) | SSDGSKVYTDSVKGRFTISRDNAKNSVYLQMNSLRAEDTAVYYCYYFRTTSG |
| (SEQ ID NO: 469) | SSMRYWGQGTLVTVSS |
| Exemplary anti-target | EVQLVESGGGLVQPGGSLTLSCVASGRISSINAMGWYRRAPGKQRELVAGI |
| (DLL3) | SSDGSKVYNDSVKGRFTISRDNAKNSVYLQMNSLRAEDTAVYYCYYFRTVSG |
| (SEQ ID NO: 470) | TSMRYWGQGTLVTVSS |
| Exemplary anti-target | EVQLVESGGGLVQPGGSLTLSCVASGSTSSRNAMGWYRRAPGKQRELVAGI |
| (DLL3) | SSDGSKVTADSVKGRFTISRDNAKNSVYLQMNSLRAEDTAVYYCYYFRTRSG |
| (SEQ ID NO: 471) | SSMRYWGQGTLVTVSS |
| Exemplary anti-target | EVQLVESGGGLVQPGGSLTLSCVASGSTKSINAMGWYRRAPGKQRELVAGI |
| (DLL3) | SSDGSKVYRDSVKGRFTISRDNAKNSVYLQMNSLRAEDTAVYYCYYFRTSSG |
| (SEQ ID NO: 472) | SSMRYWGQGTLVTVSS |
| Exemplary anti-target | EVQLVESGGGLVQPGGSLTLSCVASGSTSSRNAMGWYRRAPGKQRELVAGI |
| (DLL3) | SSNGSKVYSDSVKGRFTISRDNAKNSVYLQMNSLRAEDTAVYYCYYFRTVSG |
| (SEQ ID NO: 473) | SSMSYWGQGTLVTVSS |
| Exemplary anti-target | EVQLVESGGGLVQPGGSLTLSCVASGSTSSINAIGWYRRAPGKQRELVAGISS |
| (DLL3) | DGSKVYSDSVKGRFTISRDNAKNSVYLQMNSLRAEDTAVYYCYYFRPVSGSS |
| (SEQ ID NO: 474) | MRYWGQGTLVTVSS |
| Exemplary anti-target | EVQLVESGGGLVQPGGSLTLSCVASGSTSLINAMGWYRRAPGKQRELVAGI |
| (DLL3) | SSDGSKVYADSVKGRFTISRDNAKNSVYLQMNSLRAEDTAVYYCYYFRHVSG |
| (SEQ ID NO: 475) | SSMRYWGQGTLVTVSS |
| Exemplary anti-target | EVQLVESGGGLVQPGGSLTLSCVASGSTSSINAMAWYRRAPGKQRELVAGI |
| (DLL3) | SSDGSKVYADSVKGRFTISRDNAKNSVYLQMNSLRAEDTAVYYCYYFRTKSG |
| (SEQ ID NO: 476) | SSMRYWGQGTLVTVSS |
| Exemplary anti-target | EVQLVESGGGLVQPGGSLTLSCVASGSTSSINAMGWYRRAPGKQRELVAGI |
| (DLL3) | SSDGSLVYADSVKGRFTISRDNAKNSVYLQMNSLRAEDTAVYYCYYFTTVSG |
| (SEQ ID NO: 477) | SSMRYWGQGTLVTVSS |
| Exemplary anti-target | EVQLVESGGGLVQPGGSLTLSCVASGTTSSINAMGWYRRAPGKQRELVAGI |
| (DLL3) | SSDGTKVYADSVKGRFTISRDNAKNSVYLQMNSLRAEDTAVYYCYYFHTVSG |
| (SEQ ID NO: 478) | SSMRYWGQGTLVTVSS |
| Exemplary anti-target | EVQLVESGGGLVQPGGSLTLSCVASGSTSSINAFGWYRRAPGKQRELVAGIS |
| (DLL3) | SDGSKVYADSVKGRFTISRDNAKNSVYLQMNSLRAEDTAVYYCYYFRTVRGS |
| (SEQ ID NO: 479) | SMRYWGQGTLVTVSS |
| Exemplary anti-target | EVQLVESGGGLVQPGGSLTLSCVASGSTSSRNAMGWYRRAPGKQRELVAGI |
| (DLL3) | SSDGSKLYLDSVKGRFTISRDNAKNSVYLQMNSLRAEDTAVYYCYYFRTVLGS |
| (SEQ ID NO: 480) | SMRYWGQGTLVTVSS |
| Exemplary anti-target | EVQLVESGGGLVQPGGSLTLSCVASGNTSSINAMGWYRRAPGKQRELVAGI |
| (DLL3) | SSDGSRVYADSVKGRFTISRDNAKNSVYLQMNSLRAEDTAVYYCYYFRTVSG |
| (SEQ ID NO: 481) | SSMRSWGQGTLVTVSS |
| Exemplary anti-target | EVQLVESGGGLVQPGGSLTLSCVASGTTSSINAMGWYRRAPGKQRELVAGI |
| (DLL3) | SSDGSKVYNDSVKGRFTISRDNAKNSVYLQMNSLRAEDTAVYYCYYFRTVRG |
| (SEQ ID NO: 482) | SSMRYWGQGTLVTVSS |
| Exemplary anti-target | EVQLVESGGGLVQPGGSLTLSCVASGSTASINAMGWYRRAPGKQRELVAGI |
| (DLL3) | SSDGSKVYADSVKGRFTISRDNAKNSVYLQMNSLRAEDTAVYYCYYFRYVSG |
| (SEQ ID NO: 483) | SSMRYWGQGTLVTVSS |
| Exemplary anti-target | EVQLVESGGGLVQPGGSLTLSCVASGSTSSINAVGWYRRAPGKQRELVAGIS |
| (DLL3) | SDGSKVYVDSVKGRFTISRDNAKNSVYLQMNSLRAEDTAVYYCYYFRTVYGS |
| (SEQ ID NO: 484) | SMRYWGQGTLVTVSS |
| Exemplary anti-target | EVQLVESGGGLVQPGGSLTLSCVASGSTSSRNAMGWYRRAPGKQRELVAGI |
| (DLL3) | SSDGSKLYADSVKGRFTISRDNAKNSVYLQMNSLRAEDTAVYYCYYFRTVLG |
| (SEQ ID NO: 485) | SSMRYWGQGTLVTVSS |
| Exemplary anti-target | EVQLVESGGGLVQPGGSLTLSCVASGSTNSINAMGWYRRAPGKQRELVAGI |
| (DLL3) | SSDGSKVYKDSVKGRFTISRDNAKNSVYLQMNSLRAEDTAVYYCYYYRTVSG |
| (SEQ ID NO: 486) | SSMRYWGQGTLVTVSS |
| Exemplary anti-target | EVQLVESGGGLVQPGGSLTLSCVASGSTSSINAMAWYRRAPGKQRELVAGI |
| (DLL3) | SSDGSKVYADSVKGRFTISRDNAKNSVYLQMNSLRAEDTAVYYCYYFRSVSG |
| (SEQ ID NO: 487) | SSMRYWGQGTLVTVSS |
| Exemplary anti-target | EVQLVESGGGLVQPGGSLTLSCVASGSTSRINAMGWYRRAPGKQRELVAGI |
| (DLL3) | SSDGSKVYQDSVKGRFTISRDNAKNSVYLQMNSLRAEDTAVYYCYYFRRVSG |
| (SEQ ID NO: 488) | SSMRYWGQGTLVTVSS |
| Exemplary anti-target | EVQLVESGGGLVQPGGSLTLSCVPSGSTSNINAMGWYRRAPGKQRELPAGI |
| (DLL3) | SSDGTKIYADSAKVPFTITRDNAKNSVYLQMNSLRAEDTAVYYCYYFRTVSGT |
| (SEQ ID NO: 489) | SMRYWGQGTLVTVSS |
| Exemplary anti-target | EVQLVESGGGLVQPGGSLTLSCVASGSTSKINAMGWYRRAPGKQRELVAGI |
| (DLL3) | SSDRSKVYADSVKGRFTISRDNAKNSVYLQMNSLRAEDTAVYYCYYFRTVAG |
| (SEQ ID NO: 490) | SSMRYWGQGTLVTVSS |
| Exemplary anti-target | EVQLVESGGGLVQPGGSLTLSCVASGSTSSINALGWYRRAPGKQRELVAGIS |
| (DLL3) | SDGSLVYADSVKGRFTISRDNAKNSVYLQMNSLRAEDTAVYYCYYFRIVSGSS |
| (SEQ ID NO: 491) | MRYWGQGTLVTVSS |
| Exemplary anti-target | EVQLVESGGGLVQPGGSLTLSCVASGKTSSINAMGWYRRAPGKQRELVAGI |
| (DLL3) | SSDGSKVYADSVKGRFTISRDNAKNSVYLQMNSLRAEDTAVYYCYYFRTVSG |
| (SEQ ID NO: 490) | VSMRYWGQGTLVTVSS |
| Exemplary anti-target | EVQLVESGGGLVQPGGSLTLSCVASGSTSSINAVGWYRRAPGKQRELVAGIS |
| (DLL3) | SDGSKVYRDSVKGRFTISRDNAKNSVYLQMNSLRAEDTAVYYCYYFRTVQGS |
| (SEQ ID NO: 491) | SMRYWGQGTLVTVSS |
| Exemplary anti-target | EVQLVESGGGLVQPGGSLTLSCVASGSTSRINAMGWYRRAPGKQRELVAGI |
| (DLL3) | SSDGSKVYADSVKGRFTISRDNAKNSVYLQMNSLRAEDTAVYYCYYFRTASG |
| (SEQ ID NO: 492) | SSMRYWGQGTLVTVSS |
| Exemplary anti-target | EVQLVESGGGLVQPGGSLTLSCVASGSTSSINAMGWYRRAPGKQRELVAGI |
| (DLL3) | SSDGSKVYSDSVKGRFTISRDNAKNSVYLQMNSLRAEDTAVYYCYYFRTVSG |
| (SEQ ID NO: 493) | SSSRYWGQGTLVTVSS |
| Exemplary anti-target | EVQLVESGGGLVQPGGSLTLSCVASGSTSSINAVGWYRRAPGKQRELVAGIS |
| (DLL3) | SDGTKVYRDSVKGRFTISRDNAKNSVYLQMNSLRAEDTAVYYCYYFRTVQGS |
| (SEQ ID NO: 494) | SMRYWGQGTLVTVSS |
| Exemplary anti-target | EVQLVESGGGLVQPGGSLTLSCVASGTTSSINAMGWYRRAPGKQRELAAGI |
| (DLL3) | SSDGSKVYNDSVKGRFTISRDNAKNSVYLQMNSLRAEDTAVYYCYYFRTVRG |
| (SEQ ID NO: 495) | SSMRYWGQGTLVTVSS |
| Exemplary anti-target | EVQLVESGGGLVQPGGSLTLSCVASGSTSSINAMGWYRRAPGKQRELVAGI |
| (DLL3) | SSDGSKVYADSVKGRFTISRDNAKNSVYLQMNSLRAEDTAVYYCYYFRTKSG |
| (SEQ ID NO: 496) | SSMRYWGQGTLVTVSS |
| Exemplary anti-target | EVQLVESGGGLVQPGGSLTLSCVASGTTSSINAMGWYRRAPGKQRELVAGI |
| (DLL3) | SSDGSKVYADSVKGRFTISRDNAKNSVYLQMNSLRAEDTAVYYCYYFRTVW |
| (SEQ ID NO: 497) | GSSMRYWGQGTLVTVSS |
| Exemplary anti-target | EVQLVESGGGLVQPGGSLTLSCVASGKTSSINAMGWYRRAPGKQRELVAGI |
| (DLL3) | SSDGSKVYTDSVKGRFTISRDNAKNSVYLQMNSLRAEDTAVYYCYYFRTRSG |
| (SEQ ID NO: 498) | SSMRYWGQGTLVTVSS |
| Exemplary anti-target | EVQLVESGGGLVQPGGSLTLSCVASGSTSSINAMGWYRRAPFKQGELPAGIS |
| (DLL3) | PDGTKAYADSAKVRFTISRDNAKNSVYLQMNSLRAEDTAVYYCYYFHTVCGT |
| (SEQ ID NO: 499) | SMGYWGQGTLVTVSS |
| Exemplary anti-target | EVQLVESGGGLVQPGGSLTLSCVASGSTSAINAMGWYRRAPGKQRELVAGI |
| (DLL3) | SSDGSKVYVDSVKGRFTISRDNAKNSVYLQMNSLRAEDTAVYYCYYFRTVSG |
| (SEQ ID NO: 500) | SSQRYWGQGTLVTVSS |
| Exemplary anti-target | EVQLVESGGGLVQPGGSLTLSCVASGSPSSINAYGWYRRAPGKQRELVAGIS |
| (DLL3) | SDGSKVYSDSVKGRFTISRDNAKNSVYLQMNSLRAEDTAVYYCYYFRTVSGS |
| (SEQ ID NO: 501) | SMSYWGQGTLVTVSS |
| Exemplary anti-target | EVQLVESGGGLVQPGGSLTLSCVASGSTSSINAMGWYRRAPGKQRELVAGI |
| (DLL3) | SSDGSKVYASSVKGRFTISRDNAKNSVYLQMNSLRAEDTAVYYCYYFRTVRG |
| (SEQ ID NO: 502) | SSMRYWGQGTLVTVSS |
| Exemplary anti-target | EVQLVESGGGLVQPGGSLTLSCVASGSRSSINAMGWYRRAPGKQRELVAGI |
| (DLL3) | SADGSKVYADSVKGRFTISRDNAKNSVYLQMNSLRAEDTAVYYCYYFRTQSG |
| (SEQ ID NO: 503) | SSMRYWGQGTLVTVSS |
| Exemplary anti-target | EVQLVESGGGLVQPGGSLTLSCVASGSVSSINAMGWYRRAPGKQRELVAGI |
| (DLL3) | SSDGSKVYASSAKGRFTISRDNAKNSVYLQMNSLRAEDTAVYYCYYFRTLSGS |
| (SEQ ID NO: 504) | SMRYWGQGTLVTVSS |
| Exemplary anti-target | EVQLVESGGGLVQPGGSLTLSCVASGSTSSINAMAWYRRAPGKQRELVAGI |
| (DLL3) | SSDGSKVYADSVKGRFTISRDNAKNSVYLQMNSLRAEDTAVYYCYYFHTVSG |
| (SEQ ID NO: 505) | SSMRYWGQGTLVTVSS |
| Exemplary anti-target | EVQLVESGGGLVQPGGSLTLSCVASGSTSSINAIGWYRRAPGKQRELVAGISS |
| (DLL3) | DGSSVYADSVKGRFTISRDNAKNSVYLQMNSLRAEDTAVYYCYYFRRVSGSS |
| (SEQ ID NO: 506) | MRYWGQGTLVTVSS |
| Exemplary anti-target | EVQLVESGGGLVQPGGSLTLSCVASGSTSSINAMGWYRRAPGKQRELVAGI |
| (DLL3) | SSDGSKVYSDSVKGRFTISRDNAKNSVYLQMNSLRAEDTAVYYCYYFRLVSG |
| (SEQ ID NO: 507) | SSMRYWGQGTLVTVSS |
| Exemplary anti-target | EVQLVESGGGLVQPGGSLTLSCVASGSTSSINAVGWYRRAPGKQRELVAGIS |
| (DLL3) | SDGSKVYAGSVKGRFTISRDNAKNSVYLQMNSLRAEDTAVYYCYYFRTVSGS |
| (SEQ ID NO: 508) | YMRYWGQGTLVTVSS |
| Exemplary anti-target | EVQLVESGGGLVQPGGSLTLSCVASGSTSSINAMAWYRRAPGKQRELAAGI |
| (DLL3) | SSDNSKVYADSVKGRFTISRDNAKNSVYLQMNSLRAEDTAVYYCYYFRTVGG |
| (SEQ ID NO: 509) | SSMRYWGQGTLVTVSS |
| Exemplary anti-target | EVQLVESGGGLVQPGGSLTLSCVASGSTSSINAYGWYRRAPGKQRELVAGIS |
| (DLL3) | SDGSAVYADSVKGRFTISRDNAKNSVYLQMNSLRAEDTAVYYCYYFRTHSGS |
| (SEQ ID NO: 510) | SMRYWGQGTLVTVSS |
| Exemplary anti-target | EVQLVESGGGLVQPGGSLTLSCVASGSTSSINAVGWYRRAPGKQRELVAGIS |
| (DLL3) | SDGSSVYADSVKGRFTISRDNAKNSVYLQMNSLRAEDTAVYYCYYFRTVSTS |
| (SEQ ID NO: 511) | SMRYWGQGTLVTVSS |
| Exemplary anti-target | EVQLVESGGGLVQPGGSLTLSCVASGSKSSINAMGWYRRAPGKQRELPAGI |
| (DLL3) | SSNGTKVYADSAKVRFTISRDNAKNSVYLQMNSLRAEDTAVYYCYYFRTVLG |
| (SEQ ID NO: 512) | TSMRYWGQGTLVTVSS |
| Exemplary anti-target | EVQLVESGGGLVQPGGSLTLSCVASGSTSSINAMAWYRRAPGKQRELVAGI |
| (DLL3) | SSDGSKLYADSVKGRFTISRDNAKNSVYLQMNSLRAEDTAVYYCYYFRTVSG |
| (SEQ ID NO: 513) | SSMRYWGQGTLVTVSS |
| Exemplary anti-target | EVQLVESGGGLVQPGGSLTLSCVASGSVSSINAMGWYRRAPGKQRELVAGI |
| (DLL3) | SSDGSKVYKDSVKGRFTISRDNAKNSVYLQMNSLRAEDTAVYYCYYFRTVSG |
| (SEQ ID NO: 514) | SSMGYWGQGTLVTVSS |
| Exemplary anti-target | EVQLVESGGGLVQPGGSLTLSCVASGSTSSINAMGWYRRAPGKQRELVAGI |
| (DLL3) | SSDGSLVYADSVKGRFTISRDNAKNSVYLQMNSLRAEDTAVYYCYYFRTVSG |
| (SEQ ID NO: 515) | SSMRAWGQGTLVTVSS |
| Exemplary anti-target | EVQLVESGGGLVQPGGSLTLSCVASGSTSSINAMGWYRRAPGKQRELVAGI |
| (DLL3) | SSDGSLVYADSVKGRFTISRDNAKNSVYLQMNSLRAEDTAVYYCYYFRILSGS |
| (SEQ ID NO: 516) | SMRYWGQGTLVTVSS |
| Exemplary anti-target | EVQLVESGGGLVQPGGSLTLSCVASGSTSSINAMAWYRRAPGKQRELVAGI |
| (DLL3) | SSDGSKVYADSVKGRFTISRDNAKNSVYLQMNSLRAEDTAVYYCYYFRTVQG |
| (SEQ ID NO: 517) | SSMRYWGQGTLVTVSS |
| Exemplary anti-target | EVQLVESGGGLVQPGGSLTLSCVASGSTSYINAMGWYRRAPGKQRELVAGI |
| (DLL3) | SSDGSKVYADSVKGRFTISRDNAKNSVYLQMNSLRAEDTAVYYCYYFRTVSG |
| (SEQ ID NO: 518) | QSMGYWGQGTLVTVSS |
| Exemplary anti-target | EVQLVESGGGLVQPGGSLTLSCVASGSTSSINAMGWYRRAPGKQRELVAGV |
| (DLL3) | SSDGSKVYADSVKGRFTISRDNAKNSVYLQMNSLRAEDTAVYYCYYFRTVSG |
| (SEQ ID NO: 511) | SSARYWGQGTLVTVSS |
| Exemplary anti-target | EVQLVESGGGLVQPGGSLTLSCVASGSTSSINAMGWYRRAPGKQRELPAGI |
| (DLL3) | SRDGSKVYADSVKGRFTISRDNAKNSVYLQMNSLRAEDTAVYYCYYFRYVSG |
| (SEQ ID NO: 512) | SSMRYWGQGTLVTVSS |
| Exemplary anti-target | EVQLVESGGGLVQPGGSLTLSCVASGSTSSINAMGWYRRAPGKQRELAAGI |
| (DLL3) | SSDGSKLYADSVKGRFTISRDNAKNSVYLQMNSLRAEDTAVYYCYYFRTVSG |
| (SEQ ID NO: 513) | SSMRYWGQGTLVTVSS |
| Exemplary anti-target | EVQLVESGGGLVQPGGSLTLSCVASGSTSRINAMGWYRRAPGKQRELVAGI |
| (DLL3) | SSDGSKVYADSVKGRFTISRDNAKNSVYLQMNSLRAEDTAVYYCYYFRRVSG |
| (SEQ ID NO: 514) | SSMRYWGQGTLVTVSS |
| Exemplary anti-target | EVQLVESGGGLVQPGGSLTLSCVASGSTSSINAMAWYRRAPGKQRELAAGI |
| (DLL3) | SSDGSKVYADSVKGRFTISRDNAKNSVYLQMNSLRAEDTAVYYCYYFHTVSG |
| (SEQ ID NO: 515) | SSMRYWGQGTLVTVSS |
| Exemplary anti-target | EVQLVESGGGLVQPGGSLTLSCVASGSTSSINAMAWYRRAPGKQRELVAGI |
| (DLL3) | SSDGSKVYADSVKGRFTISRDNAKNSVYLQMNSLRAEDTAVYYCYYFRQVSG |
| (SEQ ID NO: 516) | SSMRYWGQGTLVTVSS |
| Exemplary anti-target | EVQLVESGGGLVQPGGSLTLSCVASGSTSSINAMGWYRRAPGKQRELVAGI |
| (DLL3) | SSDTSKVYADSVKGRFTISRDNAKNSVYLQMNSLRAEDTAVYYCYYFRTVSG |
| (SEQ ID NO: 517) | SYMRYWGQGTLVTVSS |
| Exemplary anti-target | EVQLVESGGGLVQPGGSLTLSCVASGSTSTINAMGWYRRAPGKQRELVAGI |
| (DLL3) | SSDGSKVYADSVKGRFTISRDNAKNSVYLQMNSLRAEDTAVYYCYYFRTASG |
| (SEQ ID NO: 518) | SSMRYWGQGTLVTVSS |
| Exemplary anti-target | EVQLVESGGGLVQPGGSLTLSCVASGSTSSINAVGWYRRAPGKQRELVAGIS |
| (DLL3) | SDGSTVYADSVKGRFTISRDNAKNSVYLQMNSLRAEDTAVYYCYYFRTVSGH |
| (SEQ ID NO: 519) | SMRYWGQGTLVTVSS |
| Exemplary anti-target | EVQLVESGGGLVQPGGSLTLSCVASGSTSSINAMGWYRRAPGKQRELAAGI |
| (DLL3) | SKDGSKVYADSAKGRFTISRDNAKNSVYLQMNSLRAEDTAVYYCYYFRTVSG |
| (SEQ ID NO: 520) | SSSRYWGQGTLVTVSS |
| Exemplary anti-target | EVQLVESGGGLVQPGGSLTLSCVASGSPSSINAYGWYRRAPGKQRELVAGIS |
| (DLL3) | SDGSKVYSDSVKGRFTISRDNAKNSVYLQMNSLRAEDTAVYYCYYFRTVSGS |
| (SEQ ID NO: 521) | SYSYWGQGTLVTVSS |
| Exemplary anti-target | EVQLVESGGGLVQPGGSLTLSCVASGSPSSINAYGWYRRAPGKQRELVAGIS |
| (DLL3) | SDGSKVYSDSVKGRFTISRDNAKNSVYLQMNSLRAEDTAVYYCYYFRTVSGS |
| (SEQ ID NO: 522) | SQSYWGQGTLVTVSS |
| Exemplary anti-target | EVQLVESGGGLVQPGGSLTLSCAASGSSVKFLSMAWYRQAPGKKRELVAGI |
| (DLL3) | SADGSTDYIDSVKGRFTISRDNAKNSVYLQMNSLRAEDTAVYYCYAYRWTRR |
| (SEQ ID NO: 523) | YTYWGQGTLVTVSS |
| Exemplary anti-target | EVQLVESGGGLVQPGGSLTLSCAASGSSVSFLSLAWYRQAPGKKRELVAGIS |
| (DLL3) | ADGSTAYIDSVKGRFTISRDNAKNSVYLQMNSLRAEDTAVYYCYAYRWRTRY |
| (SEQ ID NO: 524) | TYWGQGTLVTVSS |
| Exemplary anti-target | EVQLVESGGGLVQPGGSLTLSCAASGSRVSFLSMAWYRQAPGKKRELVAGI |
| (DLL3) | SRDGSTDYIDSVKGRFTISRDNAKNSVYLQMNSLRAEDTAVYYCYAYRWTTR |
| (SEQ ID NO: 525) | RTYWGQGTLVTVSS |
| Exemplary anti-target | EVQLVESGGGLVQPGGSLTLSCAASGSQVSFLSMAWYRQAPGKKRELVAGI |
| (DLL3) | SRDGSTDYIDSVKGRFTISRDNAKNSVYLQMNSLRAEDTAVYYCYAYRWTTR |
| (SEQ ID NO: 526) | YIYWGQGTLVTVSS |
| Exemplary anti-target | EVQLVESGGGLVQPGGSLTLSCAASGSSVSFLSMAWYRQAPGKKRELVAGIS |
| (DLL3) | EAGSTDYIDSVKGRFTISRDNAKNSVYLQMNSLRAEDTAVYYCYAYRWRTRY |
| (SEQ ID NO: 527) | TYWGQGTLVTVSS |
| Exemplary anti-target | EVQLVESGGGLVQPGGSLTLRCAASGSKVSFLSMAWYRQAPGKKRELVAGI |
| (DLL3) | SADGSTDYVDSVKGRFTISRDNAKNSVYLQMNSLRAEDTAVYYCYAYRWTR |
| (SEQ ID NO: 528) | RYTYWGQGTLVTVSS |
| Exemplary anti-target | EVQLVESGGGLVQPGGSLTLSCAASGSSVGFLSMAWYRQAPGKKRELVAGI |
| (DLL3) | SADGSTDYIRSVKGRFTISRDNAKNSVYLQMNSLRAEDTAVYYCYAYRWRTR |
| (SEQ ID NO: 529) | YTYWGQGTLVTVSS |
| Exemplary anti-target | EVQLVESGGGLVQPGGSLTLSCAASGSSVSFLSMAWYRQAPGKKRELVAGIS |
| (DLL3) | ADGSVDYIDSVKGRFTISRDNAKNSVYLQMNSLRAEDTAVYYCYAYRWTTR |
| (SEQ ID NO: 530) | YIYWGQGTLVTVSS |
| Exemplary anti-target | EVQLVESGGGLVQPGGSLTLSCAASGSRVSFLSMAWYRQAPGKKRELVAGI |
| (DLL3) | SADGSTLYIDSVKGRFTISRDNAKNSVYLQMNSLRAEDTAVYYCYAYRWTTR |
| (SEQ ID NO: 531) | RTYWGQGTLVTVSS |
| Exemplary anti-target | EVQLVESGGGLVQPGGSLTLSCAASGSSVSFLSLAWYRQAPGKKRELVAGIS |
| (DLL3) | TDGSTDYIDSVKGRFTISRDNAKNSVYLQMNSLRAEDTAVYYCYAYRWRTRY |
| (SEQ ID NO: 532) | TYWGQGTLVTVSS |
| Exemplary anti-target | EVQLVESGGGLVQPGGSLTLSCAASGSSVSFLSMAWYRQAPGKKRELVAGIS |
| (DLL3) | GDGSTDYIDSVKGRFTISRDNAKNSVYLQMNSLRAEDTAVYYCYAYRWTTR |
| (SEQ ID NO: 533) | YTYWGQGTLVTVSS |
| Exemplary anti-target | EVQLVESGGGLVQPGGSLTLSCAASGSSVQFLSMAWYRQAPGKKRELVAGI |
| (DLL3) | SADGSTDYINSVKGRFTISRDNAKNSVYLQMNSLRAEDTAVYYCYAYRWRT |
| (SEQ ID NO: 534) | RYTYWGQGTLVTVSS |
| Exemplary anti-target | EVQLVESGGGLVQPGGSLTLSCAASGSNVSFLSMAWYRQAPGKKRELVAGI |
| (DLL3) | SARGSTDYIDSVKGRFTISRDNAKNSVYLQMNSLRAEDTAVYYCYAYHWTTR |
| (SEQ ID NO: 535) | YTYWGQGTLVTVSS |
| Exemplary anti-target | EVQLVESGGGLVQPGGSLTLSCVASGSSVKFLSMAWYRQAPGKKRELVAGI |
| (DLL3) | SADGSTTYIDSVKGRFTISRDNAKNSVYLQMNSLRAEDTAVYYCYAYRWTTR |
| (SEQ ID NO: 536) | RTYWGQGTLVTVSS |
| Exemplary anti-target | EVQLVESGGGLVQPGGSLTLSCAASGKSVSFLSMAWYRQAPGKKRELVAGI |
| (DLL3) | SKDGSTDYIDSVKGRFTISRDNAKNSVYLQMNSLRAEDTAVYYCYAYRWTTR |
| (SEQ ID NO: 537) | YTYWGQGTLVTVSS |
| Exemplary anti-target | EVQLVESGGGLVQPGGSLTLSCAASGSRVSFLSMAWYRQAPGKKRELVAGI |
| (DLL3) | SADGSTTYIDSVKGRFTISRDNAKNSVYLQMNSLRAEDTAVYYCYAYRWTTR |
| (SEQ ID NO: 538) | YTYWGQGTLVTVSS |
| Exemplary anti-target | EVQLVESGGGLVQPGGSLTLSCAASGSHVSFLSMAWYRQAPGKKRELVAGI |
| (DLL3) | SANGSTDYIDSVKGRFTISRDNAKNSVYLQMNSLRAEDTAVYYCYAYRWTTR |
| (SEQ ID NO: 539) | YAYWGQGTLVTVSS |
| Exemplary anti-target | EVQLVESGGGLVQPGGSLTLSCAASGSSVSFLSMAWYRQAPGKKRELVAGIS |
| (DLL3) | RDGSTDYIDSVKGRFTISRDNAKNSVYLQMNSLRAEDTAVYYCYAYRWVTR |
| (SEQ ID NO: 540) | YTYWGQGTLVTVSS |
| Exemplary anti-target | EVQLVESGGGLVQPGGSLTLSCAASGSSVSFLSMAWYRQAPGKKRELVAGIS |
| (DLL3) | ADGSADYIDSVKGRFTISRDNAKNSVYLQMNSLRAEDTAVYYCYAYRWVTR |
| (SEQ ID NO: 541) | YTYWGQGTLVTVSS |
| Exemplary anti-target | EVQLVESGGGLVQPGGSLTLSCAASGSSVRFLSMAWYRQAPGKKRELVAGI |
| (DLL3) | SAFIGSTDYIDSVKGRFTISRDNAKNSVYLQMNSLRAEDTAVYYCYAYRWSTR |
| (SEQ ID NO: 542) | YTYWGQGTLVTVSS |
| Exemplary anti-target | EVQLVESGGGLVQPGGSLTLSCAASGSSVRFLSMAWYRQAPGKKRELVAGI |
| (DLL3) | SADGSTIYIDSVKGRFTISRDNAKNSVYLQMNSLRAEDTAVYYCYAYRWRTR |
| (SEQ ID NO: 543) | YTYWGQGTLVTVSS |
| Exemplary anti-target | EVQLVESGGGLVQPGGSLTLSCAASGSSVRFLSMAWYRQAPGKKRELVAGI |
| (DLL3) | SRDGSTVYIDSVKGRFTISRDNAKNSVYLQMNSLRAEDTAVYYCYAYRWTTR |
| (SEQ ID NO: 544) | GTYWGQGTLVTVSS |
| Exemplary anti-target | EVQLVESGGGLVQPGGSLTLSCAASGSHVSFLSMAWYRQAPGKKRELVAGI |
| (DLL3) | SADGPTDYIDSVKGRFTISRDNAKNSVYLQMNSLRAEDTAVYYCYAYRWDT |
| (SEQ ID NO: 545) | RYTYWGQGTLVTVSS |
| Exemplary anti-target | EVQLVESGGGLVQPGGSLTLSCVASGTSVSFLSMAWYRQAPGKKRELVAGI |
| (DLL3) | SADGSTTYIDSVKGRFTISRDNAKNSVYLQMNSLRAEDTAVYYCYAYRWTTR |
| (SEQ ID NO: 546) | RTYWGQGTLVTVSS |
| Exemplary anti-target | EVQLVESGGGLVQPGGSLTLSCAASGTSVSFLSIAWYRQAPGKKRELVAGISA |
| (DLL3) | DGSTDYIASVKGRFTISRDNAKNSVYLQMNSLRAEDTAVYYCYAYRWRTRYT |
| (SEQ ID NO: 547) | YWGQGTLVTVSS |
| Exemplary anti-target | EVQLVESGGGLVQPGGSLTLSCAASGSSVKFLSMAWYRQAPGKKRELVAGI |
| (DLL3) | SLDGSTDYIDSVKGRFTISRDNAKNSVYLQMNSLRAEDTAVYYCYAYRWTGR |
| (SEQ ID NO: 548) | YTYWGQGTLVTVSS |
| Exemplary anti-target | EVQLVESGGGLVQPGGSLTLSCAASGSSVSFLSMAWYRQAPGKKRELVAGIS |
| (DLL3) | ADGSTIYIDSVKGRFTISRDNAKNSVYLQMNSLRAEDTAVYYCYAYRWRTRY |
| (SEQ ID NO: 549) | TYWGQGTLVTVSS |
| Exemplary anti-target | EVQLVESGGGLVQPGGSLTLSCAASGSSVRFLSMAWYRQAPGKKRELVAGI |
| (DLL3) | SAFIGSTDYIDSVKGRFTISRDNAKNSVYLQMNSLRAEDTAVYYCYAYRWRTR |
| (SEQ ID NO: 550) | YTYWGQGTLVTVSS |
| Exemplary anti-target | EVQLVESGGGLVQPGGSLTLSCAASGSSVSFLSMAWYRQAPGKKRELVAGIS |
| (DLL3) | RDGSTDYIDSVKGRFTISRDNAKNSVYLQMNSLRAEDTAVYYCYAYRWITRY |
| (SEQ ID NO: 551) | TYWGQGTLVTVSS |
| Exemplary anti-target | EVQLVESGGGLVQPGGSLTLSCAASGSSVRFLSMAWYRQAPGKKRELVAGI |
| (DLL3) | SRDGSTDYIDSVKGRFTISRDNAKNSVYLQMNSLRAEDTAVYYCYAYRWITR |
| (SEQ ID NO: 552) | YTYWGQGTLVTVSS |
| Exemplary anti-target | EVQLVESGGGLVQPGGSLTLSCAASGSSVVFLSMAWYRQAPGKKRELVAGI |
| (DLL3) | SADGSMDYIDSVKGRFTISRDNAKNSVYLQMNSLRAEDTAVYYCYAYRWRT |
| (SEQ ID NO: 553) | RYTYWGQGTLVTVSS |
| Exemplary anti-target | EVQLVESGGGLVQPGGSLTLSCAASGSSVRFLSMAWYRQAPGKKRELVAGI |
| (DLL3) | SADGSTDYIDSVKGRFTISRDNAKNSVYLQMNSLRAEDTAVYYCYAYRWTRR |
| (SEQ ID NO: 554) | YTYWGQGTLVTVSS |
| Exemplary anti-target | EVQLVESGGGLVQPGGSLTLSCAASGSSVRFLSMAWYRQAPGKKRELVAGI |
| (DLL3) | SADGSTDYIDSVKGRFTISRDNAKNSVYLQMNSLRAEDTAVYYCYAYSWTTR |
| (SEQ ID NO: 555) | YTYWGQGTLVTVSS |
| Exemplary anti-target | EVQLVESGGGLVQPGGSLTLSCAASGSSVRFLSMAWYRQAPGKKRELVAGI |
| (DLL3) | SANGSTDYIDSVKGRFTISRDNAKNSVYLQMNSLRAEDTAVYYCYAYRWTN |
| (SEQ ID NO: 556) | RYTYWGQGTLVTVSS |
| Exemplary anti-target | EVQLVESGGGLVQPGGSLTLSCAASGSSVSRLSMAWYRQAPGKKRELVAGI |
| (DLL3) | SANGSTTYIDSVKGRFTISRDNAKNSVYLQMNSLRAEDTAVYYCYAYRWTTR |
| (SEQ ID NO: 557) | YRYWGQGTLVTVSS |
| Exemplary anti-target | EVQLVESGGGLVQPGGSLTLSCAASGSSKSFLSMAWYRQAPGKKRELVAGIS |
| (DLL3) | ADGSTSYIDSVKGRFTISRDNAKNSVYLQMNSLRAEDTAVYYCYAYRWTTRY |
| (SEQ ID NO: 558) | TYWGQGTLVTVSS |
| Exemplary anti-target | EVQLVESGGGLVQPGGSLTLSCAASGSSVSRLSMAWYRQAPGKKRELVAGI |
| (DLL3) | SADGSRDYIDSVKGRFTISRDNAKNSVYLQMNSLRAEDTAVYYCYAYRWTTR |
| (SEQ ID NO: 559) | YKYWGQGTLVTVSS |
| Exemplary anti-target | EVQLVESGGGLVQPGGSLTLSCAASGSSVKFLSMAWYRQAPGKKRELVAGI |
| (DLL3) | SADGSTMYIDSVKGRFTISRDNAKNSVYLQMNSLRAEDTAVYYCYAYRWHT |
| (SEQ ID NO: 560) | RYTYWGQGTLVTVSS |
| Exemplary anti-target | EVQLVESGGGLVQPGGSLTLSCAASGSGVRFLSMAWYRQAPGKKRELVAGI |
| (DLL3) | SPDGSTDYIDSVKGRFTISRDNAKNSVYLQMNSLRAEDTAVYYCYAYRWTRR |
| (SEQ ID NO: 561) | YTYWGQGTLVTVSS |
| Exemplary anti-target | EVQLVESGGGLVQPGGSLTLSCAASGSSVRFLSMAWYRQAPGKKRELVAGI |
| (DLL3) | SGDGSTDYIDSVKGRFTISRDNAKNSVYLQMNSLRAEDTAVYYCYAYRWMT |
| (SEQ ID NO: 562) | RYTYWGQGTLVTVSS |
| Exemplary anti-target | EVQLVESGGGLVQPGGSLTLSCAASGSSVHFLSMAWYRQAPGKKRELVAGI |
| (DLL3) | SRDGSTDYIDSVKGRFTISRDNAKNSVYLQMNSLRAEDTAVYYCYAYRWTTR |
| (SEQ ID NO: 563) | YRYWGQGTLVTVSS |
| Exemplary anti-target | EVQLVESGGGLVQPGGSLTLSCAASGSSVRFLSMAWYRQAPGKKRELVAGI |
| (DLL3) | SRDGSTDYIDSVKGRFTISRDNAKNSVYLQMNSLRAEDTAVYYCYAYRWSTR |
| (SEQ ID NO: 564) | YTYWGQGTLVTVSS |
| Exemplary anti-target | EVQLVESGGGLVQPGGSLTLSCAASGSKVSFLSMAWYRQAPGKKRELVAGI |
| (DLL3) | SRDGSTDYIDSVKGRFTISRDNAKNSVYLQMNSLRAEDTAVYYCYAYRWTTR |
| (SEQ ID NO: 565) | YTFWGQGTLVTVSS |
| Exemplary anti-target | EVQLVESGGGLVQPGGSLTLSCAASGSSVSFLSMAWYRQAPGKKRELVAGIS |
| (DLL3) | ADGSTDYIDSVKGRFTISRDNAKNSVYLQMNSLRAEDTAVYYCYAYRWRTR |
| (SEQ ID NO: 566) | YTYWGQGTLVTVSS |
| Exemplary anti-target | EVQLVESGGGLVQPGGSLTLSCAASGSKVSFLSMAWYRQAPGKKRELVAGI |
| (DLL3) | STDGSTDYIDSVKGRFTISRDNAKNSVYLQMNSLRAEDTAVYYCYAYRWTTR |
| (SEQ ID NO: 567) | RTYWGQGTLVTVSS |
| Exemplary anti-target | EVQLVESGGGLVQPGGSLTLSCAASGSRVSFLSMAWYRQAPGKKRELVAGI |
| (DLL3) | SADGSTSYIDSVKGRFTISRDNAKNSVYLQMNSLRAEDTAVYYCYAYRWATR |
| (SEQ ID NO: 568) | YTYWGQGTLVTVSS |
| Exemplary anti-target | EVQLVESGGGLVQPGGSLTLSCAASGSRVSFLSMAWYRQAPGKKRELVAGI |
| (DLL3) | SADGSTLYIDSVKGRFTISRDNAKNSVYLQMNSLRAEDTAVYYCYAYRWHTR |
| (SEQ ID NO: 569) | YTYWGQGTLVTVSS |
| Exemplary anti-target | EVQLVESGGGLVQPGGSLTLSCAASGSSVRFLSMAWYRQAPGKKRELVAGI |
| (DLL3) | SRDGSTDYIDSVKGRFTISRDNAKNSVYLQMNSLRAEDTAVYYCYAYRWGT |
| (SEQ ID NO: 570) | RYTYWGQGTLVTVSS |
| Exemplary anti-target | EVQLVESGGGLVQPGGSLTLSCAASYSSVSRLSMAWYRQAPGKKRELVAGIS |
| (DLL3) | ADGSTVYIDSVKGRFTISRDNAKNSVYLQMNSLRAEDTAVYYCYAYRWTTR |
| (SEQ ID NO: 571) | NTYWGQGTLVTVSS |
| Exemplary anti-target | EVQLVESGGGLVQPGGSLTLSCAASGSSVSFLSMAWYRQAPGKKRELVAGIS |
| (DLL3) | TDGSTDYIDSVKGRFTISRDNAKNSVYLQMNSLRAEDTAVYYCYAYRWRTRY |
| (SEQ ID NO: 572) | TYWGQGTLVTVSS |
| Exemplary anti-target | EVQLVESGGGLVQPGGSLTLSCAASGSSVSFLSMAWYRQAPGKKRELVAGIS |
| (DLL3) | ADGSTLYIDSVKGRFTISRDNAKNSVYLQMNSLRAEDTAVYYCYAYRWTTRY |
| (SEQ ID NO: 573) | AYWGQGTLVTVSS |
| Exemplary anti-target | EVQLVESGGGLVQPGGSLTLSCAASGSSVSFLSMAWYRQAPGKKRELVAGIS |
| (DLL3) | ADGRTDYIDSVKGRFTISRDNAKNSVYLQMNSLRAEDTAVYYCYAYRWRTR |
| (SEQ ID NO: 574) | YTYWGQGTLVTVSS |
| Exemplary anti-target | EVQLVESGGGLVQPGGSLTLSCVASGTSVSFLSMAWYRQAPGKKRELVAGI |
| (DLL3) | SADGSTIYIDSVKGRFTISRDNAKNSVYLQMNSLRAEDTAVYYCYAYRWTTR |
| (SEQ ID NO: 575) | RTYWGQGTLVTVSS |
| Exemplary anti-target | EVQLVESGGGLVQPGGSLTLSCAASGSSVKFLSMAWYRQAPGKKRELVAGI |
| (DLL3) | SADGSTLYIDSVKGRFTISRDNAKNSVYLQMNSLRAEDTAVYYCYAYRWTTR |
| (SEQ ID NO: 576) | RTYWGQGTLVTVSS |
| Exemplary anti-target | EVQLVESGGGLVQPGGSLTLSCAASGSSVSFLSMAWYRQAPGKKRELVAGIS |
| (DLL3) | RDGSTDYIDSVKGRFTISRDNAKNSVYLQMNSLRAEDTAVYYCYAYRWTSRY |
| (SEQ ID NO: 577) | TYWGQGTLVTVSS |
| Exemplary anti-target | EVQLVESGGGLVQPGGSLTLSCAASGSRVSFLSMAWYRQAPGKKRELVAGI |
| (DLL3) | SKDGSTDYIDSVKGRFTISRDNAKNSVYLQMNSLRAEDTAVYYCYAYRWTTR |
| (SEQ ID NO: 578) | VTYWGQGTLVTVSS |
| Exemplary anti-target | EVQLVESGGGLVQPGGSLTLSCAASGSSVSVLSMAWYRQAPGKKRELVAGI |
| (DLL3) | SADGSTDYIGSVKGRFTISRDNAKNSVYLQMNSLRAEDTAVYYCYAYRWTTR |
| (SEQ ID NO: 579) | TTYWGQGTLVTVSS |
| Exemplary anti-target | EVQLVESGGGLVQPGGSLTLSCAASGSSVSFLSMAWYRQAPGKKRELVAGIS |
| (DLL3) | VDGSTDYIDSVKGRFTISRDNAKNSVYLQMNSLRAEDTAVYYCYAYRWRTR |
| (SEQ ID NO: 580) | YTYWGQGTLVTVSS |
| Exemplary anti-target | EVQLVESGGGLVQPGGSLTLSCAASGSRVSFLSMAWYRQAPGKKRELVAGI |
| (DLL3) | SADGSTGYIDSVKGRFTISRDNAKNSVYLQMNSLRAEDTAVYYCYAYRWAT |
| (SEQ ID NO: 581) | RYTYWGQGTLVTVSS |
| Exemplary anti-target | EVQLVESGGGLVQPGGSLTLSCVASGSSVKFLSMAWYRQAPGKKRELVAGI |
| (DLL3) | SGDGSTTYIDSVKGRFTISRDNAKNSVYLQMNSLRAEDTAVYYCYAYRWTTR |
| (SEQ ID NO: 582) | RTYWGQGTLVTVSS |
| Exemplary anti-target | EVQLVESGGGLVQPGGSLTLSCAASGSSVRFLSMAWYRQAPGKKRELVAGI |
| (DLL3) | STDGSTDYIDSVKGRFTISRDNAKNSVYLQMNSLRAEDTAVYYCYALRWTTR |
| (SEQ ID NO: 583) | YTYWGQGTLVTVSS |
| Exemplary anti-target | EVQLVESGGGLVQPGGSLTLSCAASGSSVSQLSMAWYRQAPGKKRELVAGI |
| (DLL3) | SADGSTDYFDSVKGRFTISRDNAKNSVYLQMNSLRAEDTAVYYCYAYRWTT |
| (SEQ ID NO: 584) | RGTYWGQGTLVTVSS |
| Exemplary anti-target | EVQLVESGGGLVQPGGSLTLSCAASGSRVSFLSMAWYRQAPGKKRELVAGI |
| (DLL3) | SADGSTSYIDSVKGRFTISRDNAKNSVYLQMNSLRAEDTAVYYCYAYRWRTR |
| (SEQ ID NO: 585) | YTYWGQGTLVTVSS |
| Exemplary anti-target | EVQLVESGGGLVQPGGSLTLSCAASKSSVSFLSMAWYRQAPGKKRELVAGIS |
| (DLL3) | ADGSTDYIDSVKGRFTISRDNAKNSVYLQMNSLRAEDTAVYYCYAYRWTTR |
| (SEQ ID NO: 586) | ATYWGQGTLVTVSS |
| Exemplary anti-target | EVQLVESGGGLVQPGGSLTLSCAASGSSVSFLSMAWYRQAPGKKRELVAGIS |
| (DLL3) | ADGSTAYIDSVKGRFTISRDNAKNSVYLQMNSLRAEDTAVYYCYAYRWTTRR |
| (SEQ ID NO: 587) | TYWGQGTLVTVSS |
| Exemplary anti-target | EVQLVESGGGLVQPGGSLTLSCAASGSSVKFLSMAWYRQAPGKKRELVAGI |
| (DLL3) | SADGSTVYIDSVKGRFTISRDNAKNSVYLQMNSLRAEDTAVYYCYAYRWPTR |
| (SEQ ID NO: 588) | YTYWGQGTLVTVSS |
| Exemplary anti-target | EVQLVESGGGLVQPGGSLTLSCAASGSSVRFLSMAWYRQAPGKKRELVAGI |
| (DLL3) | SQDGSTDYIDSVKGRFTISRDNAKNSVYLQMNSLRAEDTAVYYCYAYRWRT |
| (SEQ ID NO: 589) | RYTYWGQGTLVTVSS |
| Exemplary anti-target | EVQLVESGGGLVQPGGSLTLSCAASGSSVRFLSMAWYRQAPGKKRELVAGI |
| (DLL3) | SNDGSTDYIDSVKGRFTISRDNAKNSVYLQMNSLRAEDTAVYYCYAYRWKT |
| (SEQ ID NO: 590) | RYTYWGQGTLVTVSS |
| Exemplary anti-target | EVQLVESGGGLVQPGGSLTLSCAASGSRVSFLSMAWYRQAPGKKRELVAGI |
| (DLL3) | SARGSTDYIDSVKGRFTISRDNAKNSVYLQMNSLRAEDTAVYYCYAYRWSTR |
| (SEQ ID NO: 591) | YTYWGQGTLVTVSS |
| Exemplary anti-target | EVQLVESGGGLVQPGGSLTLSCAASGSSVSFLSLAWYRQAPGKKRELVAGIS |
| (DLL3) | ADGSTDYIDSVKGRFTISRDNAKNSVYLQMNSLRAEDTAVYYCYAYRWKTR |
| (SEQ ID NO: 592) | RTYWGQGTLVTVSS |
| Exemplary anti-target | EVQLVESGGGLVQPGGSLTLSCAASGSSVRFLSMAWYRQAPGKKRELVAGI |
| (DLL3) | SRDGSTDYIDSVKGRFTISRDNAKNSVYLQMNSLRAEDTAVYYCYAYRWTTR |
| (SEQ ID NO: 593) | RTYWGQGTLVTVSS |
| Exemplary anti-target | EVQLVESGGGLVQPGGSLTLSCAASGSKVSFLSMAWYRQAPGKKRELVAGI |
| (DLL3) | SADGSTLYIDSVKGRFTISRDNAKNSVYLQMNSLRAEDTAVYYCYAYRWTTR |
| (SEQ ID NO: 594) | YRYWGQGTLVTVSS |
| Exemplary anti-target | EVQLVESGGGLVQPGGSLTLSCAASGSSVSFLSMAWYRQAPGKKRELVAGIS |
| (DLL3) | ADGSTNYIDSVKGRFTISRDNAKNSVYLQMNSLRAEDTAVYYCYAYRWRTR |
| (SEQ ID NO: 595) | YTYWGQGTLVTVSS |
| Exemplary anti-target | EVQLVESGGGLVQPGGSLTLSCAASGSSVRFLSMAWYRQAPGKKRELVAGI |
| (DLL3) | SADGSTVYIDSVKGRFTISRDNAKNSVYLQMNSLRAEDTAVYYCYAYRWTTR |
| (SEQ ID NO: 596) | YKYWGQGTLVTVSS |
| Exemplary anti-target | EVQLVESGGGLVQPGGSLTLSCAASGSKVSFLSMAWYRQAPGKKRELVAGI |
| (DLL3) | SADGSTTYIDSVKGRFTISRDNAKNSVYLQMNSLRAEDTAVYYCYAYRWKTR |
| (SEQ ID NO: 597) | YTYWGQGTLVTVSS |
| Exemplary anti-target | EVQLVESGGGLVQPGGSLTLSCAASGSSVKFLSMAWYRQAPGKKRELVAGI |
| (DLL3) | SADGSTDYIGSVKGRFTISRDNAKNSVYLQMNSLRAEDTAVYYCYAYRWTTR |
| (SEQ ID NO: 598) | VTYWGQGTLVTVSS |
| Exemplary anti-target | EVQLVESGGGLVQPGGSLTLSCAASGSSVKFLSMAWYRQAPGKKRELVAGI |
| (DLL3) | SRDGSTDYIDSVKGRFTISRDNAKNSVYLQMNSLRAEDTAVYYCYAYRWTTR |
| (SEQ ID NO: 599) | FTYWGQGTLVIVSS |
| Exemplary anti-target | EVQLVESGGGLVQPGGSLTLSCAASGSRVSFLSMAWYRQAPGKKRELVAGI |
| (DLL3) | SADGSTTYIDSVKGRFTISRDNAKNSVYLQMNSLRAEDTAVYYCYAYRWTTR |
| (SEQ ID NO: 600) | FTYWGQGTLVIVSS |
| Exemplary anti-target | EVQLVESGGGLVQPGGSLTLSCAASGSSVLFLSMAWYRQAPGKKRELVAGV |
| (DLL3) | SSDGSTDYIDSVKGRFTISRDNAKNSVYLQMNSLRAEDTAVYYCYAYRWRTR |
| (SEQ ID NO: 601) | YTYWGQGTLVTVSS |
| Exemplary anti-target | EVQLVESGGGLVQPGGSLTLSCAASGSRVSFLSMAWYRQAPGKKRELVAGI |
| (DLL3) | SADGHTDYIDSVKGRFTISRDNAKNSVYLQMNSLRAEDTAVYYCYAYRWTT |
| (SEQ ID NO: 602) | RYTHWGQGTLVTVSS |
| Exemplary anti-target | EVQLVESGGGLVQPGGSLTLSCAASGSRVSFLSMAWYRQAPGKKRELVAGI |
| (DLL3) | SADGSTDYFDSVKGRFTISRDNAKNSVYLQMNSLRAEDTAVYYCYAYRWTR |
| (SEQ ID NO: 603) | RYTYWGQGTLVTVSS |
| Exemplary anti-target | EVQLVESGGGLVQPGGSLTLSCAASGSSVGFLSMAWYRQAPGKKRELVAGI |
| (DLL3) | SADGSTVYIDSVKGRFTISRDNAKNSVYLQMNSLRAEDTAVYYCYAYRWTTR |
| (SEQ ID NO: 604) | YTYWGQGTLVTVSS |
| Exemplary anti-target | EVQLVESGGGLVQPGGSLTLSCAASGSSVSFMSMAWYRQAPGKKRELVAGI |
| (DLL3) | SADGSTDYIASVKGRFTISRDNAKNSVYLQMNSLRAEDTAVYYCYAYRWTTR |
| (SEQ ID NO: 605) | STYWGQGTLVIVSS |
| Exemplary anti-target | EVQLVESGGGLVQPGGSLTLSCAASGSSVSFLSMAWYRQAPGKKRELVAGIS |
| (DLL3) | ADGSTDYISSVKGRFTISRDNAKNSVYLQMNSLRAEDTAVYYCYAYSWTTRY |
| (SEQ ID NO: 606) | TYWGQGTLVTVSS |
| Exemplary anti-target | EVQLVESGGGLVQPGGSLTLSCAASGSSVTFLSMAWYRQAPGKKRELVAGI |
| (DLL3) | SADGSTVYIDSVKGRFTISRDNAKNSVYLQMNSLRAEDTAVYYCYAYRWTTR |
| (SEQ ID NO: 607) | GTYWGQGTLVTVSS |
| Exemplary anti-target | EVQLVESGGGLVQPGGSLTLSCAASGSSVRFLSMAWYRQAPGKKRELVAGI |
| (DLL3) | SADGSTVYIDSVKGRFTISRDNAKNSVYLQMNSLRAEDTAVYYCYAYRWKTR |
| (SEQ ID NO: 608) | YTYWGQGTLVTVSS |
| Exemplary anti-target | EVQLVESGGGLVQPGGSLTLSCAASGSKVSFLSMAWYRQAPGKKRELVAGI |
| (DLL3) | SADGSTTYIDSVKGRFTISRDNAKNSVYLQMNSLRAEDTAVYYCYAYRWTTR |
| (SEQ ID NO: 609) | FTYWGQGTLVIVSS |
| Exemplary anti-target | EVQLVESGGGLVQPGGSLTLSCAASGSKVSFMSMAWYRQAPGKKRELVAG |
| (DLL3) | ISVDGSTDYIDSVKGRFTISRDNAKNSVYLQMNSLRAEDTAVYYCYAYRWRT |
| (SEQ ID NO: 610) | RYTYWGQGTLVTVSS |
| Exemplary anti-target | EVQLVESGGGLVQPGGSLTLSCAASGSSVSNLSMAWYRQAPGKKRELVAGI |
| (DLL3) | SADGSTAYIDSVKGRFTISRDNAKNSVYLQMNSLRAEDTAVYYCYAYRWTTR |
| (SEQ ID NO: 611) | RTYWGQGTLVTVSS |
| Exemplary anti-target | EVQLVESGGGLVQPGGSLTLSCAASNSSVSKLSMAWYRQAPGKKRELVAGI |
| (DLL3) | SADGSTAYIDSVKGRFTISRDNAKNSVYLQMNSLRAEDTAVYYCYAYRWSTR |
| (SEQ ID NO: 612) | YTYWGQGTLVTVSS |
| Exemplary anti-target | EVQLVESGGGLVQPGGSLTLSCAASGSKVSFLSMAWYRQAPGKKRELVAGI |
| (DLL3) | SADGSKDYIDSVKGRFTISRDNAKNSVYLQMNSLRAEDTAVYYCYAYRWTTR |
| (SEQ ID NO: 613) | LTYWGQGTLVTVSS |
| Exemplary anti-target | EVQLVESGGGLVQPGGSLTLSCVASGSQVSFLSMAWYRQAPGKKRELVAGI |
| (DLL3) | SADGSTDYFDSVKGRFTISRDNAKNSVYLQMNSLRAEDTAVYYCYAYRWTR |
| (SEQ ID NO: 614) | RYTYWGQGTLVTVSS |
| Exemplary anti-target | EVQLVESGGGLVQPGGSLTLSCAASGSKVSFMSMAWYRQAPGKKRELVAG |
| (DLL3) | ISADGSTDYIDSVKGRFTISRDNAKNSVYLQMNSLRAEDTAVYYCYAYRWTT |
| (SEQ ID NO: 615) | RLTYWGQGTLVTVSS |
| Exemplary anti-target | EVQLVESGGGLVQPGGSLTLSCAASGSRVSFLSMAWYRQAPGKKRELVAGI |
| (DLL3) | SADGSTVYIDSVKGRFTISRDNAKNSVYLQMNSLRAEDTAVYYCYAYRWTRR |
| (SEQ ID NO: 616) | YTYWGQGTLVTVSS |
| Exemplary anti-target | EVQLVESGGGLVQPGGSLTLSCAASGSSVRFLSMAWYRQAPGKKRELVAGI |
| (DLL3) | SADGSTVYIDSVKGRFTISRDNAKNSVYLQMNSLRAEDTAVYYCYAYRWTTR |
| (SEQ ID NO: 617) | RTYWGQGTLVTVSS |
| Exemplary anti-target | EVQLVESGGGLVQPGGSLTLSCAASGSKVSFLSMAWYRQAPGKKRELVAGI |
| (DLL3) | SARGSTDYIDSVKGRFTISRDNAKNSVYLQMNSLRAEDTAVYYCYAYQWTTR |
| (SEQ ID NO: 618) | YTYWGQGTLVTVSS |
| Exemplary anti-target | EVQLVESGGGLVQPGGSLTLSCAASGSSVRFLSMAWYRQAPGKKRELVAGI |
| (DLL3) | SATGSTDYIDSVKGRFTISRDNAKNSVYLQMNSLRAEDTAVYYCYAYRWTRR |
| (SEQ ID NO: 619) | YTYWGQGTLVTVSS |
| Exemplary anti-target | EVQLVESGGGLVQPGGSLTLSCAASGSSVSFLSIAWYRQAPGKKRELVAGISK |
| (DLL3) | DGSTDYIDSVKGRFTISRDNAKNSVYLQMNSLRAEDTAVYYCYAYRWTTRM |
| (SEQ ID NO: 620) | TYWGQGTLVTVSS |
| Exemplary anti-target | EVQLVESGGGLVQPGGSLTLSCAASGSSSSFLSMAWYRQAPGKKRELVAGIS |
| (DLL3) | ADGSTVYIDSVKGRFTISRDNAKNSVYLQMNSLRAEDTAVYYCYAYRWTTRR |
| (SEQ ID NO: 621) | TYWGQGTLVTVSS |
| Exemplary anti-target | EVQLVESGGGLVQPGGSLTLSCAASGSSVKFLSMAWYRQAPGKKRELVAGI |
| (DLL3) | SPDGSTDYIDSVKGRFTISRDNAKNSVYLQMNSLRAEDTAVYYCYAYRWTTR |
| (SEQ ID NO: 622) | YRYWGQGTLVTVSS |
| Exemplary anti-target | EVQLVESGGGLVQPGGSLTLSCAASGSSVNFLSMAWYRQAPGKKRELVAGI |
| (DLL3) | SADGSTHYIDSVKGRFTISRDNAKNSVYLQMNSLRAEDTAVYYCYAYRWLTR |
| (SEQ ID NO: 623) | YTYWGQGTLVTVSS |
| Exemplary anti-target | EVQLVESGGGLVQPGGSLTLSCAASGSSVKFLSMAWYRQAPGKKRELVAGI |
| (DLL3) | SADGSTDYILSVKGRFTISRDNAKNSVYLQMNSLRAEDTAVYYCYAYEWTTR |
| (SEQ ID NO: 624) | YTYWGQGTLVTVSS |
| Exemplary anti-target | EVQLVESGGGLVQPGGSLTLSCAASGSSVSFLSMAWYRQAPGKKRELVAGIS |
| (DLL3) | ADGSTDYIHSVKGRFTISRDNAKNSVYLQMNSLRAEDTAVYYCYAYRWRTR |
| (SEQ ID NO: 625) | YTYWGQGTLVTVSS |
| Exemplary anti-target | EVQLVESGGGLVQPGGSLTLSCAASGSSVRFLSMAWYRQAPGKKRELVAGI |
| (DLL3) | SVDGSTDYIDSVKGRFTISRDNAKNSVYLQMNSLRAEDTAVYYCYAYRWRTR |
| (SEQ ID NO: 626) | YTYWGQGTLVTVSS |
| Exemplary anti-target | EVQLVESGGGLVQPGGSLTLSCAASGSSVSFLSVAWYRQAPGKKRELVAGIS |
| (DLL3) | RDGSTDYIDSVKGRFTISRDNAKNSVYLQMNSLRAEDTAVYYCYAYRWRTRY |
| (SEQ ID NO: 627) | TYWGQGTLVTVSS |
| Exemplary anti-target | EVQLVESGGGLVQPGGSLTLSCAASGSQVSFLSMAWYRQAPGKKRELVAGI |
| (DLL3) | SADGSTVYIDSVKGRFTISRDNAKNSVYLQMNSLRAEDTAVYYCYAYRWSTR |
| (SEQ ID NO: 628) | YTYWGQGTLVTVSS |
| Exemplary anti-target | EVQLVESGGGLVQPGGSLTLSCAASGTSVSFLSMAWYRQAPGKKRELVAGI |
| (DLL3) | SADGSTDYIRSVKGRFTISRDNAKNSVYLQMNSLRAEDTAVYYCYAYRWTTR |
| (SEQ ID NO: 629) | LTYWGQGTLVTVSS |
| Exemplary anti-target | EVQLVESGGGLVQPGGSLTLSCAASGSRVSFLSMAWYRQAPGKKRELVAGI |
| (DLL3) | SADGSTMYIDSVKGRFTISRDNAKNSVYLQMNSLRAEDTAVYYCYAYRWTT |
| (SEQ ID NO: 630) | RLTYWGQGTLVTVSS |
| Exemplary anti-target | EVQLVESGGGLVQPGGSLTLSCAASGSSVKFLSMAWYRQAPGKKRELVAGI |
| (DLL3) | STDGSTDYIDSVKGRFTISRDNAKNSVYLQMNSLRAEDTAVYYCYAYKWTTR |
| (SEQ ID NO: 631) | YTYWGQGTLVTVSS |
| Exemplary anti-target | EVQLVESGGGLVQPGGSLTLSCAASGSSVSFLSSAWYRQAPGKKRELVAGIS |
| (DLL3) | ADGSTLYIDSVKGRFTISRDNAKNSVYLQMNSLRAEDTAVYYCYAYRWTTRS |
| (SEQ ID NO: 632) | TYWGQGTLVTVSS |
| Exemplary anti-target | EVQLVESGGGLVQPGGSLTLSCAASGSSVKFLSMAWYRQAPGKKRELVAGI |
| (DLL3) | SADGSTDYIDSVKGRFTISRDNAKNSVYLQMNSLRAEDTAVYYCYAYRWRTR |
| (SEQ ID NO: 633) | YTYWGQGTLVTVSS |
| Exemplary anti-target | EVQLVESGGGLVQPGGSLTLSCAASGSSVSFLSMAWYRQAPGKKRELVAGIS |
| (DLL3) | ATGSTDYIDSVKGRFTISRDNAKNSVYLQMNSLRAEDTAVYYCYAYRWSTRY |
| (SEQ ID NO: 634) | TYWGQGTLVTVSS |
| Exemplary anti-target | EVQLVESGGGLVQPGGSLTLSCAASGSTVSFLSMAWYRQAPGKKRELVAGI |
| (DLL3) | SHDGSTDYIDSVKGRFTISRDNAKNSVYLQMNSLRAEDTAVYYCYAYRWTTR |
| (SEQ ID NO: 635) | YTYWGQGTLVTVSS |
| Exemplary anti-target | EVQLVESGGGLVQPGGSLTLSCAASGSSVQFLSMAWYRQAPGKKRELVAGI |
| (DLL3) | SYDGSTDYIDSVKGRFTISRDNAKNSVYLQMNSLRAEDTAVYYCYAYRWRTR |
| (SEQ ID NO: 636) | YTYWGQGTLVTVSS |
| Exemplary anti-target | EVQLVESGGGLVQPGGSLTLSCAASRSSVSFLSMAWYRQAPGKKRELVAGIS |
| (DLL3) | TDGSTDYIDSVKGRFTISRDNAKNSVYLQMNSLRAEDTAVYYCYAYRWLTRY |
| (SEQ ID NO: 637) | TYWGQGTLVTVSS |
| Exemplary anti-target | EVQLVESGGGLVQPGGSLTLSCAASGSKVSFLSMAWYRQAPGKKRELVAGI |
| (DLL3) | SADGSTAYIDSVKGRFTISRDNAKNSVYLQMNSLRAEDTAVYYCYAYRWRTR |
| (SEQ ID NO: 638) | YTYWGQGTLVTVSS |
| Exemplary anti-target | EVQLVESGGGLVQPGGSLTLSCAASGSRVSFLSMAWYRQAPGKKRELVAGI |
| (DLL3) | SADGSTDYIESVKGRFTISRDNAKNSVYLQMNSLRAEDTAVYYCYAYRWTTR |
| (SEQ ID NO: 639) | YTYWGQGTLVTVSS |
| Exemplary anti-target | EVQLVESGGGLVQPGGSLTLSCAASGSSVSFLSMAWYRQAPGKKRELVAGIS |
| (DLL3) | IDGSTDYIKSVKGRFTISRDNAKNSVYLQMNSLRAEDTAVYYCYAYRWTTRY |
| (SEQ ID NO: 640) | RYWGQGTLVTVSS |
| Exemplary anti-target | EVQLVESGGGLVQPGGSLTLSCAASGSKVSFLSMAWYRQAPGKKRELVAGI |
| (DLL3) | SADGSKDYIDSVKGRFTISRDNAKNSVYLQMNSLRAEDTAVYYCYAYRWTTR |
| (SEQ ID NO: 641) | YTYWGQGTLVTVSS |
| Exemplary anti-target | EVQLVESGGGLVQPGGSLTLSCAASGSSVRFLSMAWYRQAPGKKRELVAGI |
| (DLL3) | SADGSTVYIDSVKGRFTISRDNAKNSVYLQMNSLRAEDTAVYYCYAYRWPTR |
| (SEQ ID NO: 642) | YTYWGQGTLVTVSS |
| Exemplary anti-target | EVQLVESGGGLVQPGGSLTLSCAASGSSVKFLSMAWYRQAPGKKRELVAGI |
| (DLL3) | SRDGSTDYIDSVKGRFTISRDNAKNSVYLQMNSLRAEDTAVYYCYAYRWTTR |
| (SEQ ID NO: 643) | HTYWGQGTLVTVSS |
| Exemplary anti-target | EVQLVESGGGLVQPGGSLTLSCAASGSSVKFLSMAWYRQAPGKKRELVAGI |
| (DLL3) | SADGSTDYIHSVKGRFTISRDNAKNSVYLQMNSLRAEDTAVYYCYAYRWTRR |
| (SEQ ID NO: 644) | YTYWGQGTLVTVSS |
| Exemplary anti-target | EVQLVESGGGLVQPGGSLTLSCAASGSSVSILSMAWYRQAPGKKRELVAGIS |
| (DLL3) | ADGSTIYIDSVKGRFTISRDNAKNSVYLQMNSLRAEDTAVYYCYAYRWHTRY |
| (SEQ ID NO: 645) | TYWGQGTLVTVSS |
| Exemplary anti-target | EVQLVESGGGLVQPGGSLTLSCAASGSSVSFLSVAWYRQAPGKKRELVAGIS |
| (DLL3) | ANGSTDYIDSVKGRFTISRDNAKNSVYLQMNSLRAEDTAVYYCYAYRWTNR |
| (SEQ ID NO: 646) | YTYWGQGTLVTVSS |
| Exemplary anti-target | EVQLVESGGGLVQPGGSLTLSCAASGSSVRFLSMAWYRQAPGKKRELVAGI |
| (DLL3) | STDGSTDYIDSVKGRFTISRDNAKNSVYLQMNSLRAEDTAVYYCYAYRWTTR |
| (SEQ ID NO: 647) | YRYWGQGTLVTVSS |
| Exemplary anti-target | EVQLVESGGGLVQPGGSLTLSCAASGSRVSFLSMAWYRQAPGKKRELVAGI |
| (DLL3) | SYDGSTDYIDSVKGRFTISRDNAKNSVYLQMNSLRAEDTAVYYCYAYRWTTR |
| (SEQ ID NO: 648) | RTYWGQGTLVTVSS |
| Exemplary anti-target | EVQLVESGGGLVQPGGSLTLSCAASGHSVSFLSMAWYRQAPGKKRELVAGI |
| (DLL3) | SADGSTDYIASVKGRFTISRDNAKNSVYLQMNSLRAEDTAVYYCYAYRWSTR |
| (SEQ ID NO: 649) | YTYWGQGTLVTVSS |
| Exemplary anti-target | EVQLVESGGGLVQPGGSLTLSCAASGSSVRFLSMAWYRQAPGKKRELVAGI |
| (DLL3) | SADGSTDYIGSVKGRFTISRDNAKNSVYLQMNSLRAEDTAVYYCYAYRWSTR |
| (SEQ ID NO: 650) | YTYWGQGTLVTVSS |
| Exemplary anti-target | EVQLVESGGGLVQPGGSLTLSCAASGSSVSFLSMAWYRQAPGKKRELVAGIS |
| (DLL3) | ANGSTDYYDSVKGRFTISRDNAKNSVYLQMNSLRAEDTAVYYCYAYRWRTR |
| (SEQ ID NO: 651) | YTYWGQGTLVTVSS |
| Exemplary anti-target | EVQLVESGGGLVQPGGSLTLSCAASGSRVSFLSMAWYRQAPGKKRELVAGI |
| (DLL3) | SADGSTSYIDSVKGRFTISRDNAKNSVYLQMNSLRAEDTAVYYCYAYRWTTR |
| (SEQ ID NO: 652) | YTYWGQGTLVTVSS |
| Exemplary anti-target | EVQLVESGGGLVQPGGSLTLSCAASGSSVKFLSMAWYRQAPGKKRELVAGV |
| (DLL3) | SADGSTDYIDSVKGRFTISRDNAKNSVYLQMNSLRAEDTAVYYCYAYEWTTR |
| (SEQ ID NO: 653) | YTYWGQGTLVTVSS |
| Exemplary anti-target | EVQLVESGGGLVQPGGSLTLSCAASGSSVSRLSMAWYRQAPGKKRELVAGI |
| (DLL3) | SARGSTDYIDSVKGRFTISRDNAKNSVYLQMNSLRAEDTAVYYCYAYRWTTR |
| (SEQ ID NO: 654) | STYWGQGTLVTVSS |
| Exemplary anti-target | EVQLVESGGGLVQPGGSLTLSCAASGRSVSFLSMAWYRQAPGKKRELVAGI |
| (DLL3) | SADGSTIYIDSVKGRFTISRDNAKNSVYLQMNSLRAEDTAVYYCYAYRWTTR |
| (SEQ ID NO: 655) | YTYWGQGTLVTVSS |
| Exemplary anti-target | EVQLVESGGGLVQPGGSLTLSCAASGRSVSFLSMAWYRQAPGKKRELVAGI |
| (DLL3) | SANGSTDYIDSVKGRFTISRDNAKNSVYLQMNSLRAEDTAVYYCYAYRWSTR |
| (SEQ ID NO: 656) | YTYWGQGTLVTVSS |
| Exemplary anti-target | EVQLVESGGGLVQPGGSLTLSCAASGSSVKFLSMAWYRQAPGKKRELVAGI |
| (DLL3) | SADGSTDYVDSVKGRFTISRDNAKNSVYLQMNSLRAEDTAVYYCYAYRWST |
| (SEQ ID NO: 657) | RYTYWGQGTLVTVSS |
| Exemplary anti-target | EVQLVESGGGLVQPGGSLTLSCAASGSSVSKLSMAWYRQAPGKKRELVAGI |
| (DLL3) | SADGSTDYRDSVKGRFTISRDNAKNSVYLQMNSLRAEDTAVYYCYAYRWTY |
| (SEQ ID NO: 658) | RYTYWGQGTLVTVSS |
| Exemplary anti-target | EVQLVESGGGLVQPGGSLTLSCAASGSSVSRLSMAWYRQAPGKKRELVAGI |
| (DLL3) | SVDGSTDYIDSVKGRFTISRDNAKNSVYLQMNSLRAEDTAVYYCYAYRWTTR |
| (SEQ ID NO: 659) | LTYWGQGTLVTVSS |
| Exemplary anti-target | EVQLVESGGGLVQPGGSLTLSCAASGSSVKFLSLAWYRQAPGKKRELVAGIS |
| (DLL3) | ADGSTDYILSVKGRFTISRDNAKNSVYLQMNSLRAEDTAVYYCYAYEWTTRY |
| (SEQ ID NO: 660) | TYWGQGTLVTVSS |
| Exemplary anti-target | EVQLVESGGGLVQPGGSLTLSCAASGSSVSRLSLAWYRQAPGKKRELVAGIS |
| (DLL3) | VDGSTDYIDSVKGRFTISRDNAKNSVYLQMNSLRAEDTAVYYCYAYRWTTRL |
| (SEQ ID NO: 661) | TYWGQGTLVTVSS |
| Exemplary anti-target | EVQLVESGGGLVQPGGSLTLSCVASGTSSSINAMGWYRRAPGKQRELVAGI |
| (DLL3) | SSDGSKVFNESVKGRFTISRDNAKNSVYLQMNSLRAEDTAVYYCYYFRPAAG |
| (SEQ ID NO: 662) | SPMRYWGQGTLVTVSS |
| Exemplary anti-target | EVQLVESGGGLVQPGGSLTLSCVASGTTSSINAIGWYRRAPGKQRELVAGISS |
| (DLL3) | DGSEVYTDSVKGRFTISRDNAKNSVYLQMNSLRAEDTAVYYCYYFRTVDGSP |
| (SEQ ID NO: 663) | LRYWGQGTLVTVSS |
| Exemplary anti-target | EVQLVESGGGLVQPGGSLTLSCVASGSTSSINAMAWYRRAPGKQRELVAGI |
| (DLL3) | SSDDSNVYYESVKGRFTISRDNAKNSVYLQMNSLRAEDTAVYYCYYFRTVSG |
| (SEQ ID NO: 664) | SSKRYWGQGTLVTVSS |
| Exemplary anti-target | EVQLVESGGGLVQPGGSLTLSCVASGQTYRVNAFGWYRRAPGKQRELVAGI |
| (DLL3) | SSDGSKVYADSVKGRFTISRDNAKNSVYLQMNSLRAEDTAVYYCYYFSAGSG |
| (SEQ ID NO: 665) | TEMSYWGQGTLVTVSS |
| Exemplary anti-target | EVQLVESGGGLVQPGGSLTLSCVASGSTSSINAMAWYRRAPGKQRELVAGI |
| (DLL3) | SSDESTLYVDSVKGRFTISRDNAKNSVYLQMNSLRAEDTAVYYCYYFGSLSGS |
| (SEQ ID NO: 666) | STTYWGQGTLVTVSS |
| Exemplary anti-target | EVQLVESGGGLVQPGGSLTLSCVASGSASLTNATGWYRRAPGKQRELVAGI |
| (DLL3) | SSDDSKVYSDSVKGRFTISRDNAKNSVYLQMNSLRAEDTAVYYCYYFGSVSG |
| (SEQ ID NO: 667) | SWTRYWGQGTLVTVSS |
| Exemplary anti-target | EVQLVESGGGLVQPGGSLTLSCVASGYPSLNNAMGWYRRAPGKQRELVAG |
| (DLL3) | ISSDGSQVYGASVKGRFTISRDNAKNSVYLQMNSLRAEDTAVYYCYYFRLVS |
| (SEQ ID NO: 668) | GSSMSYWGQGTLVTVSS |
| Exemplary anti-target | EVQLVESGGGLVQPGGSLTLSCVASGSSSTINAIGWYRRAPGKQRELVAGISS |
| (DLL3) | DGSKVYADSVKGRFTISRDNAKNSVYLQMNSLRAEDTAVYYCYYFRTGSGTS |
| (SEQ ID NO: 669) | KSYWGQGTLVTVSS |
| Exemplary anti-target | EVQLVESGGGLVQPGGSLTLSCVASGSTSYINAMGWYRRAPGKQRELVAGI |
| (DLL3) | SSDGSNMYADSVKGRFTISRDNAKNSVYLQMNSLRAEDTAVYYCYYFSNMS |
| (SEQ ID NO: 670) | GTTRRYWGQGTLVTVSS |
| Exemplary anti-target | EVQLVESGGGLVQPGGSLTLSCVASGSTSSVNALGWYRRAPGKQRELVAGIS |
| (DLL3) | SDGSKVYTDSVKGRFTISRDNAKNSVYLQMNSLRAEDTAVYYCYYFRTVPGS |
| (SEQ ID NO: 671) | AMGYWGQGTLVTVSS |
| Exemplary anti-target | EVQLVESGGGLVQPGGSLTLSCVASGSTSLSNAVGWYRRAPGKQRELVAGIS |
| (DLL3) | SDGSKVSAESVKGRFTISRDNAKNSVYLQMNSLRAEDTAVYYCYYFRAESGS |
| (SEQ ID NO: 672) | SMGYWGQGTLVTVSS |
| Exemplary anti-target | EVQLVESGGGLVQPGGSLTLSCVASGSTSSTNAIGWYRRAPGKQRELVAGIS |
| (DLL3) | SDGSKVYDDSVKGRFTISRDNAKNSVYLQMNSLRAEDTAVYYCYYFRTLYGS |
| (SEQ ID NO: 673) | SRSYWGQGTLVTVSS |
| Exemplary anti-target | EVQLVESGGGLVQPGGSLTLSCVASGLTSTINAMGWYRRAPGKQRELVAGI |
| (DLL3) | SSDGSKVYDDSVKGRFTISRDNAKNSVYLQMNSLRAEDTAVYYCYYFSPFSG |
| (SEQ ID NO: 674) | SDTGYWGQGTLVTVSS |
| Exemplary anti-target | EVQLVESGGGLVQPGGSLTLSCVASGVSPSKNAIGWYRRAPGKQRELVAGIS |
| (DLL3) | SDGSAVYVGSVKGRFTISRDNAKNSVYLQMNSLRAEDTAVYYCYYFSTFSGS |
| (SEQ ID NO: 675) | SISYWGQGTLVTVSS |
| Exemplary anti-target | EVQLVESGGGLVQPGGSLTLSCVASGSTSSINAVGWYRRAPGKQRELVAGIS |
| (DLL3) | SDGSYVYSESVKGRFTISRDNAKNSVYLQMNSLRAEDTAVYYCYYFRTLAGSE |
| (SEQ ID NO: 676) | MRYWGQGTLVTVSS |
| Exemplary anti-target | EVQLVESGGGLVQPGGSLTLSCVASGSTTMNNAMAWYRRAPGKQRELVA |
| (DLL3) | GISSDSSHVYADSVKGRFTISRDNAKNSVYLQMNSLRAEDTAVYYCYYFRTVS |
| (SEQ ID NO: 677) | GSGVRYWGQGTLVTVSS |
| Exemplary anti-target | EVQLVESGGGLVQPGGSLTLSCVASGSTSKINAIGWYRRAPGKQRELVAGIS |
| (DLL3) | SDSSIVYTDSVKGRFTISRDNAKNSVYLQMNSLRAEDTAVYYCYYFRPGAGH |
| (SEQ ID NO: 678) | SNSYWGQGTLVTVSS |
| Exemplary anti-target | EVQLVESGGGLVQPGGSLTLSCVASGQTTALNAMGWYRRAPGKQRELVAG |
| (DLL3) | ISSDGSEVNTDSVKGRFTISRDNAKNSVYLQMNSLRAEDTAVYYCYYFRRAS |
| (SEQ ID NO: 679) | GTAMSYWGQGTLVTVSS |
| Exemplary anti-target | EVQLVESGGGLVQPGGSLTLSCVASGATSSINAIGWYRRAPGKQRELVAGIS |
| (DLL3) | SDGSKLSSDSVKGRFTISRDNAKNSVYLQMNSLRAEDTAVYYCYYFTSASGT |
| (SEQ ID NO: 680) | DLSYWGQGTLVTVSS |
| Exemplary anti-target | EVQLVESGGGLVQPGGSLTLSCVASGSTSTINAMGWYRRAPGKQRELVAGI |
| (DLL3) | SSDNSKVYADSVKGRFTISRDNAKNSVYLQMNSLRAEDTAVYYCYYFRSANG |
| (SEQ ID NO: 681) | SSKRYWGQGTLVTVSS |
| Exemplary anti-target | EVQLVESGGGLVQPGGSLTLSCVASGSTSSINAMGWYRRAPGKQRELVAGI |
| (DLL3) | SSDGSRVYFDSVKGRFTISRDNAKNSVYLQMNSLRAEDTAVYYCYYFKTIAG |
| (SEQ ID NO: 682) | AGMRYWGQGTLVTVSS |
| Exemplary anti-target | EVQLVESGGGLVQPGGSLTLSCVASGSTSLVNAMGWYRRAPGKQRELVAGI |
| (DLL3) | SSDGSLVYAESVKGRFTISRDNAKNSVYLQMNSLRAEDTAVYYCYYFRYGSG |
| (SEQ ID NO: 683) | SSLSYWGQGTLVTVSS |
| Exemplary anti-target | EVQLVESGGGLVQPGGSLTLSCVASGSTSLNNAIGWYRRAPGKQRELVAGIS |
| (DLL3) | SDGSVVYVDSVKGRFTISRDNAKNSVYLQMNSLRAEDTAVYYCYYFRTVPGA |
| (SEQ ID NO: 684) | SMKYWGQGTLVTVSS |
| Exemplary anti-target | EVQLVESGGGLVQPGGSLTLSCVASGSTSPVNAMAWYRRAPGKQRELVAGI |
| (DLL3) | SSDGSKVYVDSVKGRFTISRDNAKNSVYLQMNSLRAEDTAVYYCYYFRTVDG |
| (SEQ ID NO: 685) | SAISYWGQGTLVTVSS |
| Exemplary anti-target | EVQLVESGGGLVQPGGSLTLSCVASGTTSSMNAIGWYRRAPGKQRELVAGI |
| (DLL3) | SSDGSKLYDESVKGRFTISRDNAKNSVYLQMNSLRAEDTAVYYCYYFRNKG |
| (SEQ ID NO: 686) | SGGSYWGQGTLVTVSS |
| Exemplary anti-target | EVQLVESGGGLVQPGGSLTLSCVASGETSSINAMAWYRRAPGKQRELVAGI |
| (DLL3) | SSDYSKLYADSVKGRFTISRDNAKNSVYLQMNSLRAEDTAVYYCYYFRTVSGS |
| (SEQ ID NO: 687) | SRGYWGQGTLVTVSS |
| Exemplary anti-target | EVQLVESGGGLVQPGGSLTLSCVASGSTSTINAIGWYRRAPGKQRELVAGISS |
| (DLL3) | DSSKVYTESVKGRFTISRDNAKNSVYLQMNSLRAEDTAVYYCYYFRPGPGSQ |
| (SEQ ID NO: 688) | MAYWGQGTLVTVSS |
| Exemplary anti-target | EVQLVESGGGLVQPGGSLTLSCVASGSTYSMNAMGWYRRAPGKQRELVA |
| (DLL3) | GISSDGSQVYVDSVKGRFTISRDNAKNSVYLQMNSLRAEDTAVYYCYYFRTV |
| (SEQ ID NO: 689) | AGSASGYWGQGTLVTVSS |
| Exemplary anti-target | EVQLVESGGGLVQPGGSLTLSCVASGSPSSINAYGWYRRAPGKQRELVAGIS |
| (DLL3) | SDGSKVYSDSVKGRFTISRDNAKNSVYLQMNSLRAEDTAVYYCYYFRTVSGS |
| (SEQ ID NO: 690) | SYSYWGQGTLVTVSS |
| Exemplary anti-target | EVQLVESGGGLVQPGGSLTLSCVASGSTSTINAIGWYRRAPGKQRELVAGISS |
| (DLL3) | DGSKVYVDSVKGRFTISRDNAKNSVYLQMNSLRAEDTAVYYCYYFINLKGSS |
| (SEQ ID NO: 691) | MAYWGQGTLVTVSS |
| Exemplary anti-target | EVQLVESGGGLVQPGGSLTLSCVASGSTSSINAIGWYRRAPGKQRELVAGISS |
| (DLL3) | DGSKVYADSVKGRFTISRDNAKNSVYLQMNSLRAEDTAVYYCYYFRMVTGS |
| (SEQ ID NO: 692) | YGGYWGQGTLVTVSS |
| Exemplary anti-target | EVQLVESGGGLVQPGGSLTLSCVASGSISSINAMGWYRRAPGKQRELVAGIS |
| (DLL3) | SDGSSVYADSVKGRFTISRDNAKNSVYLQMNSLRAEDTAVYYCYYFKSSYGL |
| (SEQ ID NO: 693) | PMRYWGQGTLVTVSS |
| Exemplary anti-target | EVQLVESGGGLVQPGGSLTLSCVASGSTQVNNAMAWYRRAPGKQRELVA |
| (DLL3) | GISSDGSQVYYGSVKGRFTISRDNAKNSVYLQMNSLRAEDTAVYYCYYFKTV |
| (SEQ ID NO: 694) | SGQSLRYWGQGTLVTVSS |
| Exemplary anti-target | EVQLVESGGGLVQPGGSLTLSCVASGSTASFNAMAWYRRAPGKQRELVAGI |
| (DLL3) | SSDGSKVYTDSVKGRFTISRDNAKNSVYLQMNSLRAEDTAVYYCYYFRTVTG |
| (SEQ ID NO: 695) | RAARYWGQGTLVTVSS |
| Exemplary anti-target | EVQLVESGGGLVQPGGSLTLSCVASGSPLSINAIGWYRRAPGKQRELVAGISS |
| (DLL3) | DGSKVSADSVKGRFTISRDNAKNSVYLQMNSLRAEDTAVYYCYYFGPAIGAS |
| (SEQ ID NO: 696) | RTYWGQGTLVTVSS |
| Exemplary anti-target | EVQLVESGGGLVQPGGSLTLSCVASGSTTFINAIGWYRRAPGKQRELVAGISS |
| (DLL3) | DGSKVYEDSVKGRFTISRDNAKNSVYLQMNSLRAEDTAVYYCYYFRTVSGAP |
| (SEQ ID NO: 697) | KSYWGQGTLVTVSS |
| Exemplary anti-target | EVQLVESGGGLVQPGGSLTLSCVASGSTSSINAIGWYRRAPGKQRELVAGISS |
| (DLL3) | DRSKVYADSVKGRFTISRDNAKNSVYLQMNSLRAEDTAVYYCYYFHTVSGSS |
| (SEQ ID NO: 698) | MSYWGQGTLVTVSS |
| Exemplary anti-target | EVQLVESGGGLVQPGGSLTLSCVASGETDTINAVGWYRRAPGKQRELVAGI |
| (DLL3) | SSDGSKVYAESVKGRFTISRDNAKNSVYLQMNSLRAEDTAVYYCYYFRRLEG |
| (SEQ ID NO: 699) | YSNRYWGQGTLVTVSS |
| Exemplary anti-target | EVQLVESGGGLVQPGGSLTLSCVASGSTSPINAIGWYRRAPGKQRELVAGIS |
| (DLL3) | SDGSVVTTESVKGRFTISRDNAKNSVYLQMNSLRAEDTAVYYCYYFRTGSGS |
| (SEQ ID NO: 700) | SMGYWGQGTLVTVSS |
| Exemplary anti-target | EVQLVESGGGLVQPGGSLTLSCVASGSITSSNAMGWYRRAPGKQRELVAGI |
| (DLL3) | SSDGSHVHQESVKGRFTISRDNAKNSVYLQMNSLRAEDTAVYYCYYFTTVTG |
| (SEQ ID NO: 701) | SSMSYWGQGTLVTVSS |
| Exemplary anti-target | EVQLVESGGGLVQPGGSLTLSCAASRYSVSNLSMAWYRQAPGKKRELVAGI |
| (DLL3) | SADGSTVYVESVKGRFTISRDNAKNSVYLQMNSLRAEDTAVYYCYAYYWTE |
| (SEQ ID NO: 702) | RRPYWGQGTLVTVSS |
| Exemplary anti-target | EVQLVESGGGLVQPGDSLTLSCAASMSTV5VLSMAWYRQAPGKKRELVAGI |
| (DLL3) | SSDGSTVYIDSVKGRFTISRDNAKNSVYLQMNSLRAEDTAIYYCYAYSWDDA |
| (SEQ ID NO: 703) | HPYWGQGTLVTVSS |
| Exemplary anti-target | EVQLVESGGGLVQPGGSLTLSCAASDSYVSLLSMAWYRQAPGKKRELVAGIS |
| (DLL3) | VDGSTHYVASVKGRFTISRDNAKNSVYLQMNSLRAEDTAVYYCYAYRWMT |
| (SEQ ID NO: 704) | RLTYWGQGTLVTVSS |
| Exemplary anti-target | EVQLVESGGGLVQPGGSLTLSCAASDSAVSVLSIAWYRQAPGKKRELVAGIS |
| (DLL3) | TDGSKHYIDSVKGRFTISRDNAKNSVYLQMNSLRAEDTAVYYCYAYDWADA |
| (SEQ ID NO: 705) | QPYWGQGTLVTVSS |
| Exemplary anti-target | EVQLVESGGGLVQPGGSLTLSCAASHSSVTSLSLAWYRQAPGKKRELVAGIS |
| (DLL3) | YDGSKYYAESVKGRFTISRDNAKNSVYLQMNSLRAEDTAVYYCYAYSWTDRL |
| (SEQ ID NO: 706) | PYWGQGTLVTVSS |
| Exemplary anti-target | EVQLVESGGGLVQPGGSLTLSCAASDSVVKFLSMAWYRQAPGKKRELVAGI |
| (DLL3) | SANGSRTYMESVKGRFTISRDNAKNSVYLQMNSLRAEDTAVYYCYAYRWAT |
| (SEQ ID NO: 707) | RLPYWGQGTLVTVSS |
| Exemplary anti-target | EVQLVESGGGLVQPGGSLTLSCAASDPSVWNLSMAWYRQAPGKKRELVAG |
| (DLL3) | ISPDGSTDYVDSVKGRFTISRDNAKNSVYLQMNSLRAEDTAVYYCYAYKWS |
| (SEQ ID NO: 708) | NRLPYWGQGTLVTVSS |
| Exemplary anti-target | EVQLVESGGGLVQPGGSLTLSCAASGTSVMLLSLAWYRQAPGKKRELVAGIS |
| (DLL3) | PNGSAVYTESVKGRFTISRDNAKNSVYLQMNSLRAEDTAVYYCYAYGWKTR |
| (SEQ ID NO: 709) | QPYWGQGTLVTVSS |
| Exemplary anti-target | EVQLVESGGGLVQPGGSLTLSCAASSSPVSNLSLAWYRQAPGKKRELVAGIS |
| (DLL3) | PDGSTAYMESVKGRFTISRDNAKNSVYLQMNSLRAEDTAVYYCYAYRWPN |
| (SEQ ID NO: 710) | RRGYWGQGTLVTVSS |
| Exemplary anti-target | EVQLVESGGGLVQPGGSLTLSCAASWRSVLLLSVAWYRQAPGKKRELVAGIS |
| (DLL3) | NDGSTDYIDSVKGRFTISRDNAKNSVYLQMNSLRAEDTAVYYCYAYDWTTR |
| (SEQ ID NO: 711) | QRYWGQGTLVTVSS |
| Exemplary anti-target | EVQLVESGGGLVQPGGSLTLSCAASSSSVQYLSMAWYRQAPGKKRELVAGI |
| (DLL3) | STDGSAVYFDSVKGRFTISRDNAKNSVYLQMNSLRAEDTAVYYCYAYNWSY |
| (SEQ ID NO: 712) | AQPYWGQGTLVTVSS |
| Exemplary anti-target | EVQLVESGGGLVQPGGSLTLSCAASGTSVSLLSLAWYRQAPGKKRELVAGIS |
| (DLL3) | TGGSTHYIESVKGRFTISRDNAKNSVYLQMNSLRAEDTAVYYCYAYNWTDSL |
| (SEQ ID NO: 713) | QYWGQGTLVTVSS |
| Exemplary anti-target | EVQLVESGGGLVQPGGSLTLSCAASLSSVSNLSIAWYRQAPGKKRELVAG1ST |
| (DLL3) | DGSTVYIDSVKGRFTISRDNAKNSVYLQMNSLRAEDTAVYYCYAYSWTTSLP |
| (SEQ ID NO: 714) | YWGQGTLVTVSS |
| Exemplary anti-target | EVQLVESGGGLVQPGGSLTLSCAASMYSVSFLSMAWYRQAPGKKRELVAGI |
| (DLL3) | SNEGSTYYMDSVKGRFTISRDNAKNSVYLQMNSLRAEDTAVYYCYAYKWRS |
| (SEQ ID NO: 715) | RSTYWGQGTLVTVSS |
| Exemplary anti-target | EVQLVESGGGLVQPGGSLTLSCAASKSSVSHLSLAWYRQAPGKKRELVAGIS |
| (DLL3) | ADGSHVYTNSVKGRFTISRDNAKNSVYLQMNSLRAEDTAVYYCYAYSQTTR |
| (SEQ ID NO: 716) | DPYWGQGTLVTVSS |
| Exemplary anti-target | EVQLVESGGGLVQPGGSLTLSCAASYTSVLDLSIAWYRQAPGKKRELVAGIS |
| (DLL3) | DDGSRYYTDSVKGRFTISRDNAKNSVYLQMNSLRAEDTAVYYCYAYRWTAR |
| (SEQ ID NO: 717) | DTYWGQGTLVTVSS |
| Exemplary anti-target | EVQLVESGGGLVQPGGSLTLSCAASMSDVSFLSMAWYRQAPGKKRELVAGI |
| (DLL3) | SAEGSTLYMESVKGRFTISRDNAKNSVYLQMNSLRAEDTAVYYCYAYRWTS |
| (SEQ ID NO: 718) | RLSYWGQGTLVTVSS |
| Exemplary anti-target | EVQLVESGGGLVQPGGSLTLSCAASESSVSFLSSAWYRQAPGKKRELVAGIST |
| (DLL3) | DGSTVYIDSVKGRFTISRDNAKNSVYLQMNSLRAEDTAVYYCYAYSWTTRSR |
| (SEQ ID NO: 719) | YWGQGTLVTVSS |
| Exemplary anti-target | EVQLVESGGGLVQPGGSLTLSCAASGDSVSLLSMAWYRQAPGKKRELVAGI |
| (DLL3) | SANGSTSYIDSVKGRFTISRDNAKNSVYLQMNSLRAEDTAVYYCYAYNWTSR |
| (SEQ ID NO: 720) | YRYWGQGTLVTVSS |
| Exemplary anti-target | EVQLVESGGGLVQPGGSLTLSCAASGSDVWYLSLAWYRQAPGKKRELVAGI |
| (DLL3) | SDDGSRHYIESVKGRFTISRDNAKNSVYLQMNSLRAEDTAVYYCYAYSWKTR |
| (SEQ ID NO: 721) | FPYWGQGTLVTVSS |
| Exemplary anti-target | EVQLVESGGGLVQPGGSLTLSCAASKSAVAFLSIAWYRQAPGKKRELVAGIS |
| (DLL3) | PDGSTVYIESVKGRFTISRDNAKNSVYLQMNSLRAEDTAVYYCYAYSWTTRY |
| (SEQ ID NO: 722) | PYWGQGTLVTVSS |
| Exemplary anti-target | EVQLVESGGGLVQPGGSLTLSCAASFSAVAYLSMAWYRQAPGKKRELVAGI |
| (DLL3) | SDDGSTVYVDSVKGRFTISRDNAKNSVYLQMNSLRAEDTAVYYCYAYEWTN |
| (SEQ ID NO: 723) | ALPYWGQGTLVTVSS |
| Exemplary anti-target | EVQLVESGGGLVQPGGSLTLSCAASVYSVYDLSTAWYRQAPGKKRELVAGIS |
| (DLL3) | DDGSTVYFDSVKGRFTISRDNAKNSVYLQMNSLRAEDTAVYYCYAYSWITRS |
| (SEQ ID NO: 724) | PYWGQGTLVTVSS |
| Exemplary anti-target | EVQLVESGGGLVQPGGSLTLSCAASGDSVSFLSMAWYRQAPGKKRELVAGI |
| (DLL3) | SDEGSTVYIGSVKGRFTISRDNAKNSVYLQMNSLRAEDTAVYYCYAYSVVTTR |
| (SEQ ID NO: 725) | RQYWGQGTLVTVSS |
| Exemplary anti-target | EVQLVESGGGLVQPGGSLTLSCAASSSSVSLLSLAWYRQAPGKKRELVAGISD |
| (DLL3) | DGSIVYMDSVKGRFTISRDNAKNSVYLQMNSLRAEDTAVYYCYAYSWITRSP |
| (SEQ ID NO: 726) | YWGQGTLVTVSS |
| Exemplary anti-target | EVQLVESGGGLVQPGGSLTLSCAASADSVSFLSIAWYRQAPGKKRELVAGIS |
| (DLL3) | DDGSKHYFDSVKGRFTISRDNAKNSVYLQMNSLRAEDTAVYYCYAYRWEES |
| (SEQ ID NO: 727) | RQYWGQGTLVTVSS |
| Exemplary anti-target | EVQLVESGGGLVQPGGSLTLSCAASASSVTLLSIAWYRQAPGKKRELVAGIST |
| (DLL3) | DGSTDYLHSVKGRFTISRDNAKNSVYLQMNSLRAEDTAVYYCYAYTWTTRLP |
| (SEQ ID NO: 728) | YWGQGTLVTVTS |
| Exemplary anti-target | EVQLVESGGGLVQPGGSLTLSCAASADSVSFLSIAWYRQAPGKKRELVAGIS |
| (DLL3) | DDGSKHYFDSVKGRFTISRDNAKNSVYLQMNSLRAEDTAVYYCYAYRWEES |
| (SEQ ID NO: 729) | RQYWGQGTLVTVSS |
| Exemplary anti-target | EVQLVESGGGLVQPGGSLTLSCAASGTSVWLLSMAWYRQAPGKKRELVAGI |
| (DLL3) | SYDGSTVYVESVKGRFTISRDNAKNSVYLQMNSLRAEDTAVYYCYAYSWTTR |
| (SEQ ID NO: 730) | QPYWGQGTLVTVSS |
| Exemplary anti-target | EVQLVESGGGLVQPGGSLTLSCAASGSSVSILSIAWYRQAPGKKRELVAGISD |
| (DLL3) | DGSTVYIDSVKGRFTISRDNAKNSVYLQMNSLRAEDTAVYYCYAYVWGTRLP |
| (SEQ ID NO: 731) | YWGQGTLVTVSS |
| Exemplary anti-target | EVQLVESGGGLVQPGGSLTLSCAASGTAVSNLSIAWYRQAPGKKRELVAGIS |
| (DLL3) | DDGSTVYVDSVKGRFTISRDNAKNSVYLQMNSLRAEDTAVYYCYAYEWTNA |
| (SEQ ID NO: 732) | LPYWGQGTLVTVSS |
| Exemplary anti-target | EVQLVESGGGLVQPGGSLTLSCAASGSAVSMLSLAWYRQAPGKKRELVAGI |
| (DLL3) | SDDGSQVYIDSVKGRFTISRDNAKNSVYLQMNSLRAEDTAVYYCYAYRWED |
| (SEQ ID NO: 733) | ALTYWGQGTLVTVSS |
| Exemplary anti-target | EVQLVESGGGLVQPGGSLTLSCAASGMTVFFLSMAWYRQAPGKKRELVAGI |
| (DLL3) | SVDGSTVYSDSVKGRFTISRDNAKNSVYLQMNSLRAEDTAVYYCYAYSWTTR |
| (SEQ ID NO: 734) | YPYWGQGTLVTVSS |
| Exemplary anti-target | EVQLVESGGGLVQPGGSLTLSCAASQYSVTFLSVAWYRQAPGKKRELVAGIS |
| (DLL3) | DDGSNVYIDSVKGRFTISRDNAKNSVYLQMNSLRAEDTAVYYCYAYSWIDSL |
| (SEQ ID NO: 735) | RYWGQGTLVTVSS |
| Exemplary anti-target | EVQLVESGGGLVQPGGSLTLSCAASGETVSFLSLAWYRQAPGKKRELVAGIS |
| (DLL3) | TDGSTVYFVSVKGRFTISRDNAKNSVYLQMNSLRAEDTAVYYCYAYSWTTPR |
| (SEQ ID NO: 736) | AYWGQGTLVTVSS |
| Exemplary anti-target | QVQLQESGGGLVQAGGSLRLSCAASGSIAYIYTMDWYRQAPGKQRELVATS |
| (EGFR) | TRDGNVDYAESVKGRFTISRDNAKNTVYLQMNSLKPEDTAVYYCNADLRTA |
| (SEQ ID NO: 737) | VDLIRANYWGQGTQVTVSS |
| Exemplary anti-target | QVQLQESGGGLVQAGDSLRLSCVVSGRTDSWYVMGWFRQAPGKDREFVA |
| (EGFR) | GVSWSYGNTYYADSVKGRFTASRDNAKNTAYLQMNSLNAEDTAVYYCAAR |
| (SEQ ID NO: 738) | VSREVIPTRWDLYNYWGQGTQVTVSS |
| Exemplary anti-target | QVQLQESGGGSVQPGGSLRVSCVVSRTIISINAMTWYHQAPGKRRELVAIIT |
| (EGFR) | SGGETNYADSVKGRFTISRDNAKNTAYLQMNNLKPEDTGVYYCNVVPPLGS |
| (SEQ ID NO: 739) | WGQGTQVTVSS |
| Exemplary anti-target | QVQLQESGGGRVQAGGSLRLSCSASARTLRLYAVGWFRQAPGKEREFVAGI |
| (EGFR) | GRSERTYYTDSVKGRFTLSRDNAKNTVFLEMNDLEPEDTAVYFCALTFQTTD |
| (SEQ ID NO: 740) | MVDVPTTQHEYDYWGRGTQVTVSS |
| Exemplary anti-target | QVQLQESGGGLVQAGGSLRLSCAASGSIAYIYTMDWYRQAPGKQRELVATS |
| (EGFR) | THDGNTDYADSVKGRFTISRDNVKNTVYLQMNSLKPEDTAVYYCNADLRTA |
| (SEQ ID NO: 741) | VDLIRANYWGQGTQVTVSS |
| Exemplary anti-target | QVQLQESGGGLVQPGGSLRLSCAASGSIAYIYTMDWYRQAPGKQRELVATS |
| (EGFR) | TRDGNTDYADSVKGRFTISRDNAKDTVYLQMNSLKPEDTAVYYCNADLRTA |
| (SEQ ID NO: 742) | VDLIRANYWGQGTQVTVSS |
| Exemplary anti-target | QVQLQESGGGLVQAGGSLTLSCAASGRYQMAWFRQAPEKEREFVGTISSG |
| (EGFR) | DSTWYTNSVKGRFAISRDSARNTVYLQMNDLKPEDTAIYYCAAALYYRDSRR |
| (SEQ ID NO: 743) | AADYPYWGQGTQVTVSS |
| Exemplary anti-target | QVQLQESGGGRVQAGESLRLSCSTSTRTLKLYAVGWFRQAPGKERDFVAGI |
| (EGFR) | GRSERIYYIDSVKGRFTLSRDNAKNTVFLEMNDLEPEDTAVYFCAATFQTSDN |
| (SEQ ID NO: 744) | VGVPTVQHEYDYWGQGTQVTVSS |
| Exemplary anti-target | QVQLQESGGGLVQAGGSLRLSCAASGSIAYIYTMDWYRQAPGKQRELVATS |
| (EGFR) | THDGNTDYADSVKGRFTISRDNAKNTVTLQMNSLKPEDTAVYYCNADLRTA |
| (SEQ ID NO: 745) | VDLIRANYWGQGTQVTVSS |
| Exemplary anti-target | QVQLQESGGGLVQAGGSLRLSCAASGSIAYIYTMDWYRQAPGKQRELVATF |
| (EGFR) | TRDGNTDYADSVKGRFTISRDNAKNTVYLQMNSLKPEDTAVYYCNTDLRTA |
| (SEQ ID NO: 746) | VDLIRANYWGQGTQVTVSS |
| Exemplary anti-target | QVQLQESGGGLVQAGGSLRLSCAASGSIAYIYTMDWYRQAPGKQRELVATS |
| (EGFR) | THDGNTDYADSLKGRFTISRDNAKNTVYLQMNSLKPEDTAVYYCNADLRTA |
| (SEQ ID NO: 747) | VDLIRANYWGQGTQVTVSS |
| Exemplary anti-target | QVQLQESGGGSVQAGGSLRLSCAASGRYQMAWFRQAPEKEREFVGTISSG |
| (EGFR) | DSTWYTNSLKGRFAISRDSARDTVYLQMNDLKPEDTAVYYCAAALYYRDSRR |
| (SEQ ID NO: 748) | AADYPYWGQGTQVTVSS |
| Exemplary anti-target | QVQLQESGGGLVQTGGSLRLSCAVSGSIVTINAMTWYRQAPGKRRELVAIIT |
| (EGFR) | SGGETNYADSVKGRFTISRDNAKNTAHLQMNSLNPEDTGVYYCNVVPPLGS |
| (SEQ ID NO: 749) | WGQGTQVTVSS |
| Exemplary anti-target | QVQLQESGGGLVQTGGSLRLSCAVSRSIVSIKSMTWYRQAPGKRRELVALIT |
| (EGFR) | SGGETNYSDSVKGRFTISRDNAKNTVYLQMNSLKPEDTGVYYCNVVPPLGS |
| (SEQ ID NO: 750) | WGQGTQVTVSS |
| Exemplary anti-target | QVQLQESGGGLVETGGSLRLSCAGSGSTFRHHAMAWFRQTPGKEREFVSAI |
| (EGFR) | NDHGDRTKYLDSVRGRFTISRDNTDNMVYLQMTDLRPEDTANYSCAAGPL |
| (SEQ ID NO: 751) | VDYLETTPLVYTYWGHGTQVTVSS |
| Exemplary anti-target | QVQLQESGGGLVQAGGSLRLSCAASGSIAYIYTMDWYRQAPGKQRELVATS |
| (EGFR) | THDGNTDYADSVKGRFTISRDNAKNTVYLQMNSLKPEDTAVYYCNADLRTA |
| (SEQ ID NO: 752) | VDLIRANYWGQGTQVTVSS |
| Exemplary anti-target | QVQLQESGGGSVQAGGSLTLSCAASGSIAYIYTMDWYRQAPGKQRELVATS |
| (EGFR) | THDGNTDYADSVKGRFTISRDNAKNTVYLQMNSLKPEDTAVYYCNADLRTA |
| (SEQ ID NO: 753) | VDLIRANYWGQGTQVTVSS |
| Exemplary anti-target | QVQLQESGGGLVQPGGSLRLSCTASVSIFSVNAVDWYRQSPGKERELVAIM |
| (EGFR) | TSDGSTNYGDSVKGRFTISRDNAKNTVYLQMNNLKPEDTAVYYCNTVPPRY |
| (SEQ ID NO: 754) | WGQGTQVTVSS |
| Exemplary anti-target | QVQLQESGGGLVQPGGSLRLSCAASGSIAYIYTMDWYRQAPGKQRELVATS |
| (EGFR) | TRDGNIDYADSVKGRFTISRDSAKNTVYLQMSSLKPEDTAVYYCNADLRTAV |
| (SEQ ID NO: 755) | DLIRANYWGQGTQVTVSS |
| Exemplary anti-target | QVQLQESGGGLVQAGGSLTLSCAASGRYQLAWFRQAPEKVREFVGTISSGD |
| (EGFR) | STWYTNSVKGRFAISRDSARNTVYLQMNDLKPEDTAVYYCAAALYYRDSRR |
| (SEQ ID NO: 756) | AADYPYWGQGTQVTVSS |
| Exemplary anti-target | QVQLQESGGGSVQAGGSLRLSCAASGRYHMAWFRQAPEKEREFVGTISSG |
| (EGFR) | DSTWYTNSVKGRFAISRDSARNTAYLQMNDLKPEDTAVYYCAAALYYGDSR |
| (SEQ ID NO: 757) | RAADYPYWGQGTQVTVSS |
| Exemplary anti-target | QVQLQESGGGSVQAGGSLRLSCAASGSIAYIYTMDWYRQAPGKQRELVATS |
| (EGFR) | THDGNTDYTDSVKGRFTISRDNAKNTVYLQMNSLKPEDTAVYYCNADLRTA |
| (SEQ ID NO: 758) | VDLIRANYWGQGTQVTVSS |
| Exemplary anti-target | QVQLQESGGGLVQAGGSLRLSCAASGSIAYIYTMDWYRQTPGKQRELVATS |
| (EGFR) | TRDANTDYAGSVKGRFTISRDNAKDTVYLQMNSLKPEDTAVYYCHADLRTA |
| (SEQ ID NO: 759) | VDLIRANYWGQGTQVTVSS |
| Exemplary anti-target | QVQLQESGGGLVQAGGSLRLSCAASGRYNMAWFRQAPEKEREFVGTITSA |
| (EGFR) | DSTWYTNSVKGRFAITQDSARNTVYLQMNDLKPEDTAVYYCAAALYYGDSR |
| (SEQ ID NO: 760) | RAADYPYWGQGTQVTVSS |
| Exemplary anti-target | QVQLQESGGGLVQPGGSLRLSCAASGRYQMAWFRQAPEKEREFVGTISSG |
| (EGFR) | DSTWYTNSVKGRFAISRDSARTTVYLQMNDLKPEDTAVYYCAAALYYRDSW |
| (SEQ ID NO: 761) | RAADYPYWGQGTQVTVSS |
| Exemplary anti-target | QVQLQESGGGLVQPGESLRLSCAATGRYHLAWFRQAPEKEREFVGTITSAD |
| (EGFR) | STWYTNSVKGRFAITRDSARNTVYLQMNDLKPEDTAVYYCAAALYYGDSRR |
| (SEQ ID NO: 762) | AADYPYWGQGTQVTVSS |
| Exemplary anti-target | QVQLQESGGGLVQAGGSLKLSCADSGRSFSNYIMGWFRQAPGKEREFVAG |
| (EGFR) | LGWSPGNTYYADSVKGRFTISRDNAKNMVYLQMNSLNPEDTAVYYCAARR |
| (SEQ ID NO: 763) | GDVIYTTPWNYVYWGQGTQVTVSS |
| Exemplary anti-target | QVQLQESGGGLVQAGGSLRLSCAASGSIAYIYTMDWYRQAPGKQRELVATS |
| (EGFR) | THDGNTDYADSVKGRFTISRDNAKNTVYLQMNSLKPEDTAVYYCNADLRTP |
| (SEQ ID NO: 764) | VDLIRANYWGQGTQVTVSS |
| Exemplary anti-target | QVQLQESGGGSVQAGGSLRLSCAAPGRYQMAWFRQAPEKEREFVGTISSG |
| (EGFR) | DSTWYTNSVKGRFAISRDSARNTVYLQMNDLKSEDTAVYYCAAALYYRDSR |
| (SEQ ID NO: 765) | RAIDYPYWGQGTQVTVSS |
| Exemplary anti-target | QVQLQESGGGSVQAGGSLRLSCAASGLTFSSYAMAWFRQAPGKQRELVAR |
| (EGFR) | ITSGGTTDYADSVKGRFTISRDNAKNTMYLQMNSLKPEDTAVYYCAADLTYR |
| (SEQ ID NO: 766) | NLLLKLPHYWGQGTQVTVSS |
| Exemplary anti-target | QVQLQESGGGLVQAGGSLRLSCAASGNIAYIYTMDWYRQAPGKQRELVAT |
| (EGFR) | STHDGSTDYADSVKGRFTISRDNAKNTVYLQMNSLKPEDTAVYYCNADLRT |
| (SEQ ID NO: 767) | PVDLIRANYWGQGTQVTVSS |
| Exemplary anti-target | QVQLQESGGGLVQPGGSLRLSCAASGSIAYIYTMDWYRQAPGKQRELVATS |
| (EGFR) | TWDGNTDYADSVKGRFTISRDNAKNTVYLQMNSLKPEDTAVYYCNADLRT |
| (SEQ ID NO: 768) | AVDLIRANYWGQGTQVTVSS |
| Exemplary anti-target | QVQLQESGGGLVQAGGSLRLSCAASGSIAYIYTMDWYRQAPGKQRELVATS |
| (EGFR) | THDGNTDYADSVKGRFTISRDNAKNTVYLQMSSLKPDDTAVYYCNADLRTA |
| (SEQ ID NO: 769) | VDLIRANYWGQGTQVTVSS |
| Exemplary anti-target | QVQLQESGGGLVQAGESLSLSCAASGNDFVITDMHWYRQAPGKQREWVA |
| (EGFR) | TITRFATTNYADSVKGRFTISRDNAKNTWYLQMNSLKPDDTAVYYCKAIGLR |
| (SEQ ID NO: 770) | GVPDVNRQFEVWGQGTQVTVSS |
| Exemplary anti-target | QVQLQESGGGLVQAGGSLRLSCAASGAIAYIYGMGWYRQAPGNQRELVAA |
| (EGFR) | ISSGGSTDYADSVKGRFTISRDNAKNTVYLQMSSLKPEDTAVYYCNADVRTS |
| (SEQ ID NO: 771) | RNLVRSDYWGQGTQVTVSS |
| Exemplary anti-target | QVQLQESGGGLVQAGGSLRLSCAASGRYHTAWFRQAPEKEREFVGTISSGD |
| (EGFR) | STWYTNSVKGRFAISRDSARNTVYLQMNDLKPEDTAVYYCAAALYYGDSRR |
| (SEQ ID NO: 772) | AGDYPYWGQGTQVTVSS |
| Exemplary anti-target | QVQLQESGGGLVQAGGSLRLSCAASGNIAYIYTMNWYRQAPGKQRELVAT |
| (EGFR) | STHAGNTDYADSVKGRFTISRDNAKNTVYLQMNSLKPEDTAVYYCNVDLRT |
| (SEQ ID NO: 773) | AVDLIRANYWGQGTQVTVSS |
| Exemplary anti-target | QVQLQESGGGLVQPGGSLRLSCAASGNlAYIYTMGWYRQAPGKQRELVAT |
| (EGFR) | STHDGNSDYADSVKGRFTISRDNAKNTVYLQMNTLKPDDTAVYYCNADLRT |
| (SEQ ID NO: 774) | PVDRIRGNFWGQGTQVTVSS |
| Exemplary anti-target | EVQLLESGGGLVQPGGSLTLSCAASGSIAYIYTMDWYRQAPGKQRELVATST |
| (EGFR) | RDGNVDYADSVKGRFTISRDNSKNTLYLQMNSLRAEDTAVYYCNADLRTAV |
| (SEQ ID NO: 775) | DLIRANYWGLGTQVTVSS |
| Exemplary anti-target | EVQLLESGGGLVQPGGSLTLSCAASGRTDSWYVMGWFRQAPGKDREFVA |
| (EGFR) | GVSWSYGNTYYADSVKGRFTISRDNSKNTLYLQMNSLRAEDTAVYYCAARV |
| (SEQ ID NO: 776) | SREVIPTRWDLYNYWGLGTQVTVSS |
| Exemplary anti-target | EVQLLESGGGLVQPGGSLTLSCAASARTLRLYAVGWFRQAPGKEREFVAGIG |
| (EGFR) | RSERTYYTDSVKGRFTISRDNSKNTLYLQMNSLRAEDTAVYYCALTFQTTDM |
| (SEQ ID NO: 777) | VDVPTTQHEYDYWGLGTQVTVSS |
| Exemplary anti-target | EVQLLESGGGLVQPGGSLTLSCAASGSIVTINAMTWYRQAPGKRRELVAIITS |
| (EGFR) | GGETNYADSVKGRFTISRDNSKNTLYLQMNSLRAEDTAVYYCNVVPPLGSW |
| (SEQ ID NO: 778) | GLGTQVTVSS |
| Exemplary anti-target | EVQLLESGGGLVQPGGSLTLSCAASGRYHMAWFRQAPGKEREFVGTISSGD |
| (EGFR) | STWYTNSVKGRFTISRDNSKNTLYLQMNSLRAEDTAVYYCAAALYYGDSRRA |
| (SEQ ID NO: 779) | ADYPYWGLGTQVTVSS |
| Exemplary anti-target | EVQLLESGGGLVQPGGSLTLSCAASGSTFRHHAMAWFRQTPGKEREFVSAI |
| (EGFR) | NDHGDRTKYLDSVKGRFTISRDNSKNTLYLQMNSLRAEDTAVYYCAAGPLV |
| (SEQ ID NO: 780) | DYLETTPLVYTYWGLGTQVTVSS |
| Exemplary anti-target | EVQLLESGGGLVQPGGSLTLSCAASGRSFSNYIMGWFRQAPGKEREFVAGL |
| (EGFR) | GWSPGNTYYADSVKGRFTISRDNSKNTLYLQMNSLRAEDTAVYYCAARRGD |
| (SEQ ID NO: 781) | VIYTTPWNYVYWGLGTQVTVSS |
| Exemplary anti-target | EVQLLESGGGLVQPGGSLTLSCAASGLTFSSYAMAWFRQAPGKQRELVARIT |
| (EGFR) | SGGTTDYADSVKGRFTISRDNSKNTLYLQMNSLRAEDTAVYYCAADLTYRNL |
| (SEQ ID NO: 782) | LLKLPHYWGLGTQVTVSS |
| Exemplary anti-target | EVQLLESGGGLVQPGGSLTLSCAASVSIFSVNAVDWYRQSPGKERELVAIMT |
| (EGFR) | SDGSTNYDDSVKGRFTISRDNSKNTLYLQMNSLRAEDTAVYYCNTVPPRYW |
| (SEQ ID NO: 783) | GLGTQVTVSS |
| Exemplary anti-target | EVQLLESGGGLVQPGGSLTLSCAASGNDFVITDMHWYRQAPGKQREWVA |
| (EGFR) | TITRFATTNYADSVKGRFTISRDNSKNTLYLQMNSLRAEDTAVYYCKAIGLRG |
| (SEQ ID NO: 784) | VPDVNRQFEVWGLGTQVTVSS |
| Exemplary anti-target | EVQLLESGGGLVQPGGSLTLSCAASGAIAYIYGMGWYRQAPGKQRELVAAIS |
| (EGFR) | SGGSTDYADSVKGRFTISRDNSKNTLYLQMNSLRAEDTAVYYCNADVRTSR |
| (SEQ ID NO: 785) | NLVRSDYWGLGTQVTVSS |
| Exemplary EGFR | EVQLVESGGGLVQPGNSLRLSCAASGFTFSKFGMSWVRQ [symbol] |
| ProTriTAC containing | [symbol] LEWVSSISGSGRDTLYADSVKGRFTISRDNAKTTLYLQMNSLRPEDTA |
| linker sequence L001 | VYYCTIGGSLSVSSQGTLVTVSSGGGGKPLGLQARVVGGGGT |
| (identified by residues in | QTVVTQEPSLTVSPGGTVTLTCASSTGAVTSGNYPNWVQQKPGQAPRGLIG |
| bold and italics) and | GTKFLVPGTPARFSGSLLGGKAALTLSGVQPEDEAEYYCTLWYSNRWVFGG |
| masking sequence | GTKLTVLGGGGSGGGGSGGGGSEVQLVESGGGLVQPGGSLKLSCAASGFTF |
| M027(identified by | NKYAINWVRQAPGKGLEWVARIRSKYNNYATYYADQVKDRFTISRDDSKNT |
| residues that are bold | AYLQMNNLKTEDTAVYYCVRHANFGNSYISYWAYWGQGTLVTVSSGGGGS |
| and underlined) | GGGSEVQLLESGGGLVQPGGSLTLSCAASGRTDSWYVMGWFRQAPGKDR |
| (SEQ ID No. 786) | EFVAGVSWSYGNTYYADSVKGRFTISRDNSKNTLYLQMNSLRAEDTAVYYC |
| | AARVSREVIPTRWDLYNYWGLGTQVTVSSHHHHHH |
| Exemplary EGFR | EVQLVESGGGLVQPGNSLRLSCAASGFTFSKFGMSWVRQ [symbol] |
| ProTriTAC containing | [symbol] LEWVSSISGSGRDTLYADSVKGRFTISRDNAKTTLYLQMNSLRPEDTA |
| linker sequence L040 | VYYCTIGGSLSVSSQGTLVTVSSGGGGPQASTGRSGGGGGGT |
| (identified by residues in | QTVVTQEPSLTVSPGGTVTLTCASSTGAVTSGNYPNWVQQKPGQAPRGLIG |
| bold and italics) and | GTKFLVPGTPARFSGSLLGGKAALTLSGVQPEDEAEYYCTLWYSNRWVFGG |
| masking sequence | GTKLTVLGGGGSGGGGSGGGGSEVQLVESGGGLVQPGGSLKLSCAASGFTF |
| M027(identified by | NKYAINWVRQAPGKGLEWVARIRSKYNNYATYYADQVKDRFTISRDDSKNT |
| residues that are bold | AYLQMNNLKTEDTAVYYCVRHANFGNSYISYWAYWGQGTLVTVSSGGGGS |
| and underlined) | GGGSEVQLLESGGGLVQPGGSLTLSCAASGRTDSWYVMGWFRQAPGKDR |
| (SEQ ID No. 787) | EFVAGVSWSYGNTYYADSVKGRFTISRDNSKNTLYLQMNSLRAEDTAVYYC |
| | AARVSREVIPTRWDLYNYWGLGTQVTVSSHHHHHH |
| Exemplary EGFR | EVQLVESGGGLVQPGNSLRLSCAASGFTFSKFGMSWVRQ [symbol] |
| ProTriTAC containing | [symbol] LEWVSSISGSGRDTLYADSVKGRFTISRDNAKTTLYLQMNSLRPEDTA |
| linker sequence L041 | VYYCTIGGSLSVSSQGTLVTVSSGGGGPQGSTGRAAGGGGGT |
| (identified by residues in | QTVVTQEPSLTVSPGGTVTLTCASSTGAVTSGNYPNWVQQKPGQAPRGLIG |
| bold and italics) and | GTKFLVPGTPARFSGSLLGGKAALTLSGVQPEDEAEYYCTLWYSNRWVFGG |
| masking sequence | GTKLTVLGGGGSGGGGSGGGGSEVQLVESGGGLVQPGGSLKLSCAASGFTF |
| M027(identified by | NKYAINWVRQAPGKGLEWVARIRSKYNNYATYYADQVKDRFTISRDDSKNT |
| residues that are bold | AYLQMNNLKTEDTAVYYCVRHANFGNSYISYWAYWGQGTLVTVSS |
| and underlined) | GGGGSGGGSEVQLLESGGGLVQPGGSLTLSCAASGRTDSWYVMGWFRQA |
| (SEQ ID No. 788) | PGKDREFVAGVSWSYGNTYYADSVKGRFTISRDNSKNTLYLQMNSLRAEDT |
| | AVYYCAARVSREVIPTRWDLYNYWGLGTQVTVSSHHHHHH |
| Exemplary EGFR | EVQLVESGGGLVQPGNSLRLSCAASGFTFSKFGMSWVRQ [symbol] |
| ProTriTAC containing | [symbol] LEWVSSISGSGRDTLYADSVKGRFTISRDNAKTTLYLQMNSLRPEDTA |
| linker sequence L042 | VYYCTIGGSLSVSSQGTLVTVSSGGGGPPASSGRAGGGGGT |
| (identified by residues in | QTVVTQEPSLTVSPGGTVTLTCASSTGAVTSGNYPNWVQQKPGQAPRGLIG |
| bold and italics) and | GTKFLVPGTPARFSGSLLGGKAALTLSGVQPEDEAEYYCTLWYSNRWVFGG |
| masking sequence | GTKLTVLGGGGSGGGGSGGGGSEVQLVESGGGLVQPGGSLKLSCAASGFTF |
| M027(identified by | NKYAINWVRQAPGKGLEWVARIRSKYNNYATYYADQVKDRFTISRDDSKNT |
| residues that are bold | AYLQMNNLKTEDTAVYYCVRHANFGNSYISYWAYWGQGTLVTVSS |
| and underlined) | GGGGSGGGSEVQLLESGGGLVQPGGSLTLSCAASGRTDSWYVMGWFRQA |
| (SEQ ID No. 789) | PGKDREEVAGVSWSYGNTYYADSVKGRFTISRDNSKNTLYLQMNSLRAEDT |
| | AVYYCAARVSREVIPTRWDLYNYWGLGTQVTVSSHHHHHH |
| Exemplary EGFR | EVQLVESGGGLVQPGNSLRLSCAASGFTFSKFGMSWVRQ [symbol] |
| ProTriTAC containing | [symbol] LEWVSSISGSGRDTLYADSVKGRFTISRDNAKTTLYLQMNSLRPEDTA |
| linker sequence L045 | VYYCTIGGSLSVSSQGTLVTVSSGGGGPIPVQGRAHGGGGTQTVVTQEPSL |
| (identified by residues in | TVSPGGTVTLTCASSTGAVTSGNYPNWVQQKPGQAPRGLIGGTKFLVPGTP |
| bold and italics) and | ARFSGSLLGGKAALTLSGVQPEDEAEYYCTLWYSNRWVFGGGTKLTVLGGG |
| masking sequence | GSGGGGSGGGGSEVQLVESGGGLVQPGGSLKLSCAASGFTFNKYAINWVR |
| M027(identified by | QAPGKGLEWVARIRSKYNNYATYYADQVKDRFTISRDDSKNTAYLQMNNLK |
| residues that are bold | TEDTAVYYCVRHANFGNSYISYWAYWGQGTLVTVSSGGGGSGGGS |
| and underlined) | EVQLLESGGGLVQPGGSLTLSCAASGRTDSWYVMGWFRQAPGKDREFVA |
| (SEQ ID No. 790) | GVSWSYGNTYYADSVKGRFTISRDNSKNTLYLQMNSLRAEDTAVYYCAARV |
| | SREVIPTRWDLYNYWGLGTQVTVSSHHHHHH |
| Exemplary EGFR | EVQLVESGGGLVQPGNSLRLSCAASGFTFSKFGMSWVRQGGGGGLDGNEE |
| ProTriTAC containing a | PGGLEWVSSISGSGRDTLYADSVKGRFTISRDNAKTTLYLQMNSLRPEDTAV |
| non-cleavable linker | YYCTIGGSLSVSSQGTLVTVSSGGGGSGGGGSGGVVGGGGTQTVVTQEPSL |
| sequence(identified by | TVSPGGTVTLTCASSTGAVTSGNYPNWVQQKPGQAPRGLIGGTKFLVPGTP |
| residues in bold and | ARFSGSLLGGKAALTLSGVQPEDEAEYYCTLWYSNRWVFGGGTKLTVLGGG |
| italics) and masking | GSGGGGSGGGGSEVQLVESGGGLVQPGGSLKLSCAASGFTFNKYAINWVR |
| sequence | QAPGKGLEWVARIRSKYNNYATYYADQVKDRFTISRDDSKNTAYLQMNNLK |
| M027(identified by | TEDTAVYYCVRHANFGNSYISYWAYWGQGTLVTVSS |
| residues that are bold | GGGGSGGGSEVQLLESGGGLVQPGGSLTLSCAASGRTDSWYVMGWFRQA |
| and underlined) | PGKDREFVAGVSWSYGNTYYADSVKGRFTISRDNSKNTLYLQMNSLRAEDT |
| (SEQ ID No. 791) | AVYYCAARVSREVIPTRWDLYNYWGLGTQVTVSSHHHHHH |
| Exemplary GFP TriTAC | QVQLVESGGALVQPGGSLRLSCAASGFPVNRYSMRWYRQAPGKEREWVA |
| Sequence | GMSSAGDRSSYEDSVKGRFTISRDDARNTVYLQMNSLKPEDTAVYYCNVNV |
| (SEQ ID No. 792) | GFEYWGQGTQVTVSSGGGGSGGGSEVQLVESGGGLVQPGNSLRLSCAASG |
| | FTFSKFGMSWVRQAPGKGLEWVSSISGSGRDTLYADSVKGRFTISRDNAKT |
| | TLYLQMNSLRPEDTAVYYCTIGGSLSVSSQGTLVTVSSGGGGSGGGSEVQLV |
| | ESGGGLVQPGGSLKLSCAASGFTFNKYAINWVRQAPGKGLEWVARIRSKYN |
| | NYATYYADQVKDRFTISRDDSKNTAYLQMNNLKTEDTAVYYCVRHANFGNS |
| | YISYWAYWGQGTLVTVSSGGGGSGGGGSGGGGSQTVVTQEPSLIVSPGGT |
| | VTLTCASSTGAVTSGNYPNWVQQKPGQAPRGLIGGTKFLVPGTPARFSGSL |
| | LGGKAALTLSGVQPEDEAEYYCTLWYSNRWVFGGGTKLTVLHHHHHH |
| Exemplary EGFR TriTAC | EVQLLESGGGLVQPGGSLTLSCAASGRTDSWYVMGWFRQAPGKDREFVA |
| Sequence | GVSWSYGNTYYADSVKGRFTISRDNSKNTLYLQMNSLRAEDTAVYYCAARV |
| (SEQ ID No. 793) | SREVIPTRWDLYNYWGLGTQVTVSSGGGGSGGGSEVQLVESGGGLVQPGN |
| | SLRLSCAASGFTFSKFGMSWVRQAPGKGLEWVSSISGSGRDTLYADSVKGR |
| | FTISRDNAKTTLYLQMNSLRPEDTAVYYCTIGGSLSVSSQGTLVTVSSGGGGS |
| | GGGSEVQLVESGGGLVQPGGSLKLSCAASGFTFNKYAINWVRQAPGKGLE |
| | WVARIRSKYNNYATYYADQVKDRFTISRDDSKNTAYLQMNNLKTEDTAVYY |
| | CVRHANFGNSYISYWAYWGQGTLVTVSSGGGGSGGGGSGGGGSQTVVTQ |
| | EPSLTVSPGGTVTLTCASSTGAVTSGNYPNWVQQKPGQAPRGLIGGTKFLV |
| | PGTPARFSGSLLGGKAALTLSGVQPEDEAEYYCTLWYSNRWVFGGGTKLTVL |
| | HHHHHH |
| Exemplary anti-CD3 scFv | QTVVTQEPSLIVSPGGTVTLTCASSTGAVISGNYPNWVQQKPGQAPRGLIG |
| (SEQ ID NO: 794) | GTKFLVPGTPARFSGSLLGGKAALTLSGVQPEDEAEYYCTLWYSNRWVFGG |
| | GTKLTVLGGGGSGGGGSGGGGSEVQLVESGGGLVQPGGSLKLSCAASGFTF |
| | NKYAINWVRQAPGKGLEWVARIRSKYNNYATYYADQVKDRFTISRDDSKNT |
| | AYLQMNNLKTEDTAVYYCVRHANFGNSYISYWAYWGQGTLVTVSS |
| Exemplary proCAR | MALPVTALLLPLALLLHAARPTSDYKDDDDKTTTPAPRPPTPAPTIASQPLSLR |
| construct C1081 (SEQ ID | PEACRPAAGGAVHTRGLDFACDIYIWAPLAGTCGVLLLSLVITLYKRGRKKLLY |
| No. 804) | IFKQPFMRPVQTTQEEDGCSCRFPEEEEGGCELRVKFSRSADAPAYQQGQN |
| | QLYNELNLGRREEYDVLDKRRGRDPEMGGKPRRKNPQEGLYNELQKDKMA |
| | EAYSEIGMKGERRRGKGHDGLYQGLSTATKDTYDALHMQALPPR |
| Exemplary proCAR | MALPVTALLLPLALLLHAARPEVQLLESGGGLVQPGGSLTLSCAASGRSFSNY |
| construct C1824 (SEQ ID | IMGWFRQAPGKEREFVAGLGWSPGNTYYADSVKGRFTISRDNSKNTLYLQ |
| No. 805) | MNSLRAEDTAVYYCAARRGDVIYTTPWNYVYWGLGTQVTVSSTSDYKDDD |
| | DKTTTPAPRPPTPAPTIASQPLSLRPEACRPAAGGAVHTRGLDFACDIYIWAP |
| | LAGTCGVLLLSLVITLYKRGRKKLLYIFKQPFMRPVQTTQEEDGCSCRFPEEEE |
| | GGCELRVKFSRSADAPAYQQGQNQLYNELNLGRREEYDVLDKRRGRDPEM |
| | GGKPRRKNPQEGLYNELQKDKMAEAYSEIGMKGERRRGKGHDGLYQGLST |
| | ATKDTYDALHMQALPPR |
| Exemplary proCAR | MALPVTALLLPLALLLHAARPEVQLVESGGGLVQPGNSLRLSCAASGFTFSKF |
| construct C1826 (SEQ ID | GMSWVRQAPGKGLEWVSSISGSGRDTLYADSVKGRFTISRDNAKTTLYLQ |
| No. 806) | MNSLRPEDTAVYYCTIGGSLSVSSQGTLVTVSSGSGGSGGGGSGGGGGSGE |
| | VQLLESGGGLVQPGGSLTLSCAASGRSFSNYIMGWFRQAPGKEREFVAGLG |
| | WSPGNTYYADSVKGRFTISRDNSKNTLYLQMNSLRAEDTAVYYCAARRGDV |
| | IYTTPWNYVYWGLGTQVTVSSTSDYKDDDDKTTTPAPRPPTPAPTIASQPLS |
| | LRPEACRPAAGGAVHTRGLDFACDIYIWAPLAGTCGVLLLSLVITLYKRGRKK |
| | LLYIFKQPFMRPVQTTQEEDGCSCRFPEEEEGGCELRVKFSRSADAPAYQQG |
| | QNQLYNELNLGRREEYDVLDKRRGRDPEMGGKPRRKNPQEGLYNELQKDK |
| | [sequence omitted] |
| Exemplary proCAR | MALPVTALLLPLALLLHAARPEVQLVESGGGLVQPGNSLRLSCAASGFTFSKF |
| construct C1950 (SEQ ID | GMSWVRQANPWVPPREGLEWVSSISGSGRDTLYADSVKGRFTISRDNAKT |
| No. 807) | TLYLQMNSLRPEDTAVYYCTIGGSLSVSSQGTLVTVSSGSGGSGGGGSGGG |
| | GGSGEVQLLESGGGLVQPGGSLTLSCAASGRSFSNYIMGWFRQAPGKEREF |
| | VAGLGWSPGNTYYADSVKGRFTISRDNSKNTLYLQMNSLRAEDTAVYYCAA |
| | RRGDVIYTTPWNYVYWGLGTQVTVSSTSDYKDDIDDKTTTPAPRPPTPAPTI |
| | ASQPLSLRPEACRPAAGGAVHTRGLDFACDIYIWAPLAGTCGVLLLSLVITLYK |
| | RGRKKLLYIFKQPFMRPVQTTQEEDGCSCRFPEEEEGGCELRVKFSRSADAP |
| | AYQQGQNQLYNELNLGRREEYDVLDKRRGRDPEMGGKPRRKNPQEGLYN |
| | ELQKDKMAEAYSEIGMKGERRRGKGHDGLYQGLSTATKDTYDALHMQALP |
| | PR |
| Exemplary proCAR | MALPVTALLLPLALLLHAARPEVQLVESGGGLVQPGNSLRLSCAASGFTFSKF |
| construct C2031 (SEQ ID | GMSWVRQANPWVPPREGLEWVSSISGSGRDTLYADSVKGRFTISRDNAKT |
| No. 808) | TLYLQMNSLRPEDTAVYYCTIGGSLSVSSQGTLVTVSSGGGGLSGRSDNHGG |
| | GGTEVQLLESGGGLVQPGGSLTLSCAASGRSFSNYIMGWFRQAPGKEREFV |
| | AGLGWSPGNTYYADSVKGRFTISRDNSKNTLYLQMNSLRAEDTAVYYCAAR |
| | RGDVIYTTPWNYVYWGLGTQVTVSSTSDYKDDDDKTTTPAPRPPTPAPTIAS |
| | QPLSLRPEACRPAAGGAVHTRGLDFACDIYIWAPLAGTCGVLLLSLVITLYKR |
| | GRKKLLYIFKQPFMRPVQTTQEEDGCSCRFPEEEEGGCELRVKFSRSADAPA |
| | YQQGQNQLYNELNLGRREEYDVLDKRRGRDPEMGGKPRRKNPQEGLYNEL |
| | QKDKMAEAYSEIGMKGERRRGKGHDGLYQGLSTATKDTYDALHMQALPPR |
| Exemplary proCAR | MALPVTALLLPLALLLHAARPEVQLLESGGGLVQPGGSLTLSCAASGRTDSW |
| construct C1827 (SEQ ID | YVMGWFRQAPGKDREFVAGVSWSYGNTYYADSVKGRFTISRDNSKNTLYL |
| No. 809) | QMNSLRAEDTAVYYCAARVSREVIPTRWDLYNYWGLGTQVTVSSTSDYKD |
| | DDDKTTTPAPRPPTPAPTIASQPLSLRPEACRPAAGGAVHTRGLDFACDIYI |
| | WAPLAGTCGVLLLSLVITLYKRGRKKLLYIFKQPFMRPVQTTQEEDGCSCRFP |
| | EEEEGGCELRVKFSRSADAPAYQQGQNQLYNELNLGRREEYDVLDKRRGRD |
| | PEMGGKPRRKNPQEGLYNELQKDKMAEAYSEIGMKGERRRGKGHDGLYQ |
| | GLSTATKDTYDALHMQALPPR |
| Exemplary proCAR | MALPVTALLLPLALLLHAARPEVQLVESGGGLVQPGNSLRLSCAASGFTFSKF |
| construct C1829 (SEQ ID | GMSWVRQAPGKGLEWVSSISGSGRDTLYADSVKGRFTISRDNAKTTLYLQ |
| No. 810) | MNSLRPEDTAVYYCTIGGSLSVSSQGTLVTVSSGSGGSGGGGSGGGGGSGE |
| | VQLLESGGGLVQPGGSLTLSCAASGRTDSWYVMGWFRQAPGKDREFVAG |
| | VSWSYGNTYYADSVKGRFTISRDNSKNTLYLQMNSLRAEDTAVYYCAARVS |
| | REVIPTRWDLYNYWGLGTQVTVSSTSDYKDDDDKTTTPAPRPPTPAPTIASQ |
| | PLSLRPEACRPAAGGAVHTRGLDFACDIYIWAPLAGTCGVLLLSLVITLYKRGR |
| | KKLLYIFKQPFMRPVQTTQEEDGCSCRFPEEEEGGCELRVKFSRSADAPAYQ |
| | QGQNQLYNELNLGRREEYDVLDKRRGRDPEMGGKPRRKNPQEGLYNELQK |
| | DKMAEAYSEIGMKGERRRGKGHDGLYQGLSTATKDTYDALHMQALPPR |
| Exemplary proCAR | MALPVTALLLPLALLLHAARPEVQLVESGGGLVQPGNSLRLSCAASGFTFSKF |
| construct C1952 (SEQ ID | GMSWVRQAHEPLTCRGLEWVSSISGSGRDTLYADSVKGRFTISRDNAKTTL |
| No. 811) | YLQMNSLRPEDTAVYYCTIGGSLSVSSQGTLVTVSSGSGGSGGGGSGGGGG |
| | SGEVQLLESGGGLVQPGGSLTLSCAASGRTDSWYVMGWFRQAPGKDREFV |
| | AGVSWSYGNTYYADSVKGRFTISRDNSKNTLYLQMNSLRAEDTAVYYCAAR |
| | VSREVIPTRWDLYNYWGLGTQVTVSSTSDYKDDDDKTTTPAPRPPTPAPTIA |
| | SQPLSLRPEACRPAAGGAVHTRGLDFACDIYIWAPLAGTCGVLLLSLVITLYKR |
| | GRKKLLYIFKQPFMRPVQTTQEEDGCSCRFPEEEEGGCELRVKFSRSADAPA |
| | YQQGQNQLYNELNLGRREEYDVLDKRRGRDPEMGGKPRRKNPQEGLYNEL |
| | QKDKMAEAYSEIGMKGERRRGKGHDGLYQGLSTATKDTYDALHMQALPPR |
| Exemplary proCAR | MALPVTALLLPLALLLHAARPEVQLVESGGGLVQPGNSLRLSCAASGFTFSKF |
| construct C1954 (SEQ ID | GMSWVRQASHPMSCRGLEWVSSISGSGRDTLYADSVKGRFTISRDNAKTTL |
| No. 812) | YLQMNSLRPEDTAVYYCTIGGSLSVSSQGTLVTVSSGSGGSGGGGSGGGGG |
| | SGEVQLLESGGGLVQPGGSLTLSCAASGRTDSWYVMGWFRQAPGKDREFV |
| | AGVSWSYGNTYYADSVKGRFTISRDNSKNTLYLQMNSLRAEDTAVYYCAAR |
| | VSREVIPTRWDLYNYWGLGTQVTVSSTSDYKDDDDKTTTPAPRPPTPAPTIA |
| | SQPLSLRPEACRPAAGGAVHTRGLDFACDIYIWAPLAGTCGVLLLSLVITLYKR |
| | GRKKLLYIFKQPFMRPVQTTQEEDGCSCRFPEEEEGGCELRVKFSRSADAPA |
| | YQQGQNQLYNELNLGRREEYDVLDKRRGRDPEMGGKPRRKNPQEGLYNEL |
| | QKDKMAEAYSEIGMKGERRRGKGHDGLYQGLSTATKDTYDALHMQALPPR |
| Exemplary proCAR | MALPVTALLLPLALLLHAARPEVQLVESGGGLVQPGNSLRLSCAASGFTFSKF |
| construct C2033 (SEQ ID | GMSWVRQAHEPLTCRGLEWVSSISGSGRDTLYADSVKGRFTISRDNAKTTL |
| No. 813) | YLQMNSLRPEDTAVYYCTIGGSLSVSSQGTLVTVSSGGGGLSGRSDNHGGG |
| | GTEVQLLESGGGLVQPGGSLTLSCAASGRTDSWYVMGWFRQAPGKDREFV |
| | AGVSWSYGNTYYADSVKGRFTISRDNSKNTLYLQMNSLRAEDTAVYYCAAR |
| | VSREVIPTRWDLYNYWGLGTQVTVSSTSDYKDDDDKTTTPAPRPPTPAPTIA |
| | SQPLSLRPEACRPAAGGAVHTRGLDFACDIYIWAPLAGTCGVLLLSLVITLYKR |
| | GRKKLLYIFKQPFMRPVQTTQEEDGCSCRFPEEEEGGCELRVKFSRSADAPA |
| | YQQGQNQLYNELNLGRREEYDVLDKRRGRDPEMGGKPRRKNPQEGLYNEL |
| | QKDKMAEAYSEIGMKGERRRGKGHDGLYQGLSTATKDTYDALHMQALPPR |
| Exemplary proCAR | MALPVTALLLPLALLLHAARPEVQLVESGGGLVQPGNSLRLSCAASGFTFSKF |
| construct C1953 (SEQ ID | GMSWVRQASHPMSCRGLEWVSSISGSGRDTLYADSVKGRFTISRDNAKTTL |
| No. 814) | YLQMNSLRPEDTAVYYCTIGGSLSVSSQGTLVTVSSGSGGPLGLQARVVGGS |
| | GEVQLLESGGGLVQPGGSLTLSCAASGRTDSWYVMGWFRQAPGKDREFV |
| | AGVSWSYGNTYYADSVKGRFTISRDNSKNTLYLQMNSLRAEDTAVYYCAAR |
| | VSREVIPTRWDLYNYWGLGTQVTVSSTSDYKDDDDKTTTPAPRPPTPAPTIA |
| | SQPLSLRPEACRPAAGGAVHTRGLDFACDIYIWAPLAGTCGVLLLSLVITLYKR |
| | GRKKLLYIFKQPFMRPVQTTQEEDGCSCRFPEEEEGGCELRVKFSRSADAPA |
| | YQQGQNQLYNELNLGRREEYDVLDKRRGRDPEMGGKPRRKNPQEGLYNEL |
| | QKDKMAEAYSEIGMKGERRRGKGHDGLYQGLSTATKDTYDALHMQALPPR |
| Exemplary proCAR | MALPVTALLLPLALLLHAARPEVQLVESGGGLVQPGNSLRLSCAASGFTFSKF |
| construct C2035 (SEQ ID | GMSWVRQASHPMSCRGLEWVSSISGSGRDTLYADSVKGRFTISRDNAKTTL |
| No. 815) | YLQMNSLRPEDTAVYYCTIGGSLSVSSQGTLVTVSSGGGGLSGRSDNHGGG |
| | GTEVQLLESGGGLVQPGGSLTLSCAASGRTDSWYVMGWFRQAPGKDREFV |
| | AGVSWSYGNTYYADSVKGRFTISRDNSKNTLYLQMNSLRAEDTAVYYCAAR |
| | VSREVIPTRWDLYNYWGLGTQVTVSSTSDYKDDDDKTTTPAPRPPTPAPTIA |
| | SQPLSLRPEACRPAAGGAVHTRGLDFACDIYIWAPLAGTCGVLLLSLVITLYKR |
| | GRKKLLYIFKQPFMRPVQTTQEEDGCSCRFPEEEEGGCELRVKFSRSADAPA |
| | YQQGQNQLYNELNLGRREEYDVLDKRRGRDPEMGGKPRRKNPQEGLYNEL |
| | QKDKMAEAYSEIGMKGERRRGKGHDGLYQGLSTATKDTYDALHMQALPPR |
| CD8a signal peptide | MALPVTALLLPLALLLHAARP |
| (SEQ ID No. 816) | |
| 10G sdAb (SEQ ID No. | EVQLVESGGGLVQPGNSLRLSCAASGFTFSKFGMSWVRQAPGKGLEWVSSI |
| 817) | SGSGRDTLYADSVKGRFTISRDNAKTTLYLQMNSLRPEDTAVYYCTIGGSLSV |
| | SSQGTLVTVSS |
| 10G sdAb EH4 Mask 1 | EVQLVESGGGLVQPGNSLRLSCAASGFTFSKFGMSWVRQANPWVPPREGL |
| (SEQ ID No. 818) | EWVSSISGSGRDTLYADSVKGRFTISRDNAKTTLYLQMNSLRPEDTAVYYCTI |
| | GGSLSVSSQGTLVTVSS |
| 10G sdAb EH104 Mask 1 | EVQLVESGGGLVQPGNSLRLSCAASGFTFSKFGMSWVRQAHEPLTCRGLE |
| (SEQ ID No. 819) | WVSSISGSGRDTLYADSVKGRFTISRDNAKTTLYLQMNSLRPEDTAVYYCTIG |
| | GSLSVSSQGTLVTVSS |
| 10G sdAb EH104 Mask 2 | EVQLVESGGGLVQPGNSLRLSCAASGFTFSKFGMSWVRQASHPMSCRGLE |
| (SEQ ID No. 820) | WVSSISGSGRDTLYADSVKGRFTISRDNAKTTLYLQMNSLRPEDTAVYYCTIG |
| | GSLSVSSQGTLVTVSS |
| EH4 sdAb (SEQ ID No. | EVQLLESGGGLVQPGGSLTLSCAASGRSFSNYIMGWFRQAPGKEREFVAGL |
| 821) | GWSPGNTYYADSVKGRFTISRDNSKNTLYLQMNSLRAEDTAVYYCAARRGD |
| | VIYTTPWNYVYWGLGTQVTVSS |
| EH104 sdAb (SEQ ID No. | EVQLLESGGGLVQPGGSLTLSCAASGRTDSWYVMGWFRQAPGKDREFVA |
| 822) | GVSWSYGNTYYADSVKGRFTISRDNSKNTLYLQMNSLRAEDTAVYYCAARV |
| | SREVIPTRWDLYNYWGLGTQVTVSS |
| CD8a hinge/TM (SEQ ID | TTTPAPRPPTPAPTIASQPLSLRPEACRPAAGGAVHTRGLDFACDIYIWAPLA |
| No. 823) | GTCGVLLLSLVITLY |
| 4-1BB intracellular | KRGRKKLLYIFKQPFMRPVQTTQEEDGCSCRFPEEEEGGCEL |
| domain (SEQ ID No. 824) | |
| CD3z intracellular | RVKFSRSADAPAYQQGQNQLYNELNLGRREEYDVLDKRRGRDPEMGGKPR |
| domain (SEQ ID No. 825) | RKNPQEGLYNELQKDKMAEAYSEIGMKGERRRGKGHDGLYQGLSTATKDT |
| | YDALHMQALPPR |
| non-cleavable linker | GSGGSGGGGSGGGGGSG |
| (SEQ ID No. 826) | |
| protease cleavable | GGGGLSGRSDNHGGGGT |
| linker 1 (SEQ ID No. 827) | |
| protease cleavable | GSGGPLGLQARVVGGSG |
| linker 2 (SEQ ID No. 828) | |
| EH4 Mask 1 (SEQ ID No. | ANPWVPPREG |
| 829) | |
| EH 104 Mask 1 (SEQ | IDAHEPLTCRG |
| No. 830) | |
| EH104 Mask 2 (SEQ ID | ASHPMSCRG |
| No. 831) | |
| Exemplary proCAR | MALPVTALLLPLALLLHAARPEVQLVESGGGLVQPGNSLRLSCAASGFTFSKF |
| construct C2446 (SEQ ID | GMSWVRQANPWVPPREGLEWVSSISGSGRDTLYADSVKGRFTISRDNAKT |
| No. 832) | TLYLQMNSLRPEDTAVYYCTIGGSLSVSSQGTLVTVSSGGGGPPASSGRAGG |
| | GGGGTEVQLLESGGGLVQPGGSLTLSCAASGRSFSNYIMGWFRQAPGKERE |
| | FVAGLGWSPGNTYYADSVKGRFTISRDNSKNTLYLQMNSLRAEDTAVYYCA |
| | ARRGDVIYTTPWNYVYWGLGTQVTVSSTSDYKDDDDKTTTPAPRPPTPAPT |
| | IASQPLSLRPEACRPAAGGAVHTRGLDFACDIYIWAPLAGTCGVLLLSLVITLY |
| | KRGRKKLLYIFKQPFMRPVQTTQEEDGCSCRFPEEEEGGCELRVKFSRSADA |
| | PAYQQGQNQLYNELNLGRREEYDVLDKRRGRDPEMGGKPRRKNPQEGLY |
| | NELQKDKMAEAYSEIGMKGERRRGKGHDGLYQGLSTATKDTYDALHMQAL |
| | PPR |
| Exemplary proCAR | MALPVTALLLPLALLLHAARPEVQLLESGGGLVQPGGSLTLSCAASGRSFSNY |
| construct C2448 (SEQ ID | IMGWFRQAPGKEREFVAGLGWSPGNTYYADSVKGRFTISRDNSKNTLYLQ |
| No. 833) | MNSLRAEDTAVYYCAARRGDVIYTTPWNYVYWGLGTQVTVSSTSDYKDDD |
| | DKTTTPAPRPPTPAPTIASQPLSLRPEACRPAAGGAVHTRGLDFASDIYIWAP |
| | LAGTCGVLLLSLVITLYKRGRKKLLYIFKQPFMRPVQTTQEEDGCSCRFPEEEE |
| | GGCELRVKFSRSADAPAYQQGQNQLYNELNLGRREEYDVLDKRRGRDPEM |
| | GGKPRRKNPQEGLYNELQKDKMAEAYSEIGMKGERRRGKGHDGLYQGLST |
| | ATKDTYDALHMQALPPR |
| Exemplary proCAR | MALPVTALLLPLALLLHAARPEVQLVESGGGLVQPGNSLRLSCAASGFTFSKF |
| construct C2510 (SEQ ID | GMSWVRQANPWVPPREGLEWVSSISGSGRDTLYADSVKGRFTISRDNAKT |
| No. 834) | TLYLQMNSLRPEDTAVYYCTIGGSLSVSSQGTLVTVSSGGGGLSGRSDNHGG |
| | GGTEVQLLESGGGLVQPGGSLTLSCAASGRSFSNYIMGWFRQAPGKEREFV |
| | AGLGWSPGNTYYADSVKGRFTISRDNSKNTLYLQMNSLRAEDTAVYYCAAR |
| | RGDVIYTTPWNYVYWGLGTQVTVSSTSDYKDDDDKTTTPAPRPPTPAPTIAS |
| | QPLSLRPEACRPAAGGAVHTRGLDFASDIYIWAPLAGTCGVLLLSLVITLYKR |
| | GRKKLLYIFKQPFMRPVQTTQEEDGCSCRFPEEEEGGCELRVKFSRSADAPA |
| | YQQGQNQLYNELNLGRREEYDVLDKRRGRDPEMGGKPRRKNPQEGLYNEL |
| | QKDKMAEAYSEIGMKGERRRGKGHDGLYQGLSTATKDTYDALHMQALPPR |
| Exemplary proCAR | MALPVTALLLPLALLLHAARPEVQLVESGGGLVQPGNSLRLSCAASGFTFSKF |
| construct C2513 (SEQ ID | GMSWVRQANPWVPPREGLEWVSSISGSGRDTLYADSVKGRFTISRDNAKT |
| No. 835) | TLYLQMNSLRPEDTAVYYCTIGGSLSVSSQGTLVTVSSGGGGPPASSGRAGG |
| | GGGGTEVQLLESGGGLVQPGGSLTLSCAASGRSFSNYIMGWFRQAPGKERE |
| | FVAGLGWSPGNTYYADSVKGRFTISRDNSKNTLYLQMNSLRAEDTAVYYCA |
| | ARRGDVIYTTPWNYVYWGLGTQVTVSSTSDYKDDDDKTTTPAPRPPTPAPT |
| | IASQPLSLRPEACRPAAGGAVHTRGLDFASDIYIWAPLAGTCGVLLLSLVITLY |
| | KRGRKKLLYIFKQPFMRPVQTTQEEDGCSCRFPEEEEGGCELRVKFSRSADA |
| | PAYQQGQNQLYNELNLGRREEYDVLDKRRGRDPEMGGKPRRKNPQEGLY |
| | NELQKDKMAEAYSEIGMKGERRRGKGHDGLYQGLSTATKDTYDALHMQAL |
| | PPR |
| Exemplary proCAR | MALPVTALLLPLALLLHAARPEVQLVESGGGLVQPGNSLRLSCAASGFTFSKF |
| construct C2514 (SEQ ID | GMSWVRQANPWVPPREGLEWVSSISGSGRDTLYADSVKGRFTISRDNAKT |
| No. 836) | TLYLQMNSLRPEDTAVYYCTIGGSLSVSSQGTLVTVSSGSGGSGGGGSGGG |
| | GGSGEVQLLESGGGLVQPGGSLTLSCAASGRSFSNYIMGWFRQAPGKEREF |
| | VAGLGWSPGNTYYADSVKGRFTISRDNSKNTLYLQMNSLRAEDTAVYYCAA |
| | RRGDVIYTTPWNYVYWGLGTQVTVSSTSDYKDDDDKTTTPAPRPPTPAPTI |
| | ASQPLSLRPEACRPAAGGAVHTRGLDFASDIYIWAPLAGTCGVLLLSLVITLYK |
| | RGRKKLLYIFKQPFMRPVQTTQEEDGCSCRFPEEEEGGCELRVKFSRSADAP |
| | AYQQGQNQLYNELNLGRREEYDVLDKRRGRDPEMGGKPRRKNPQEGLYN |
| | ELQKDKMAEAYSEIGMKGERRRGKGHDGLYQGLSTATKDTYDALHMQALP |
| | PR |
| Exemplary proCAR | MALPVTALLLPLALLLHAARPQVQLVESGGALVQPGGSLRLSCAASGFPVNR |
| construct C2780 (SEQ ID | YSMRWYRQAPGKEREWVAGMSSAGDRSSYEDSVKGRFTISRDDARNTVYL |
| No. 837) | QMNSLKPEDTAVYYCNVNVGFEYWGQGTQVTVSSTSDYKDDDDKTTTPAP |
| | RPPTPAPTIASQPLSLRPEACRPAAGGAVHTRGLDFACDIYIWAPLAGTCGVL |
| | LLSLVITLYKRGRKKLLYIFKQPFMRPVQTTQEEDGCSCRFPEEEEGGCELRVK |
| | FSRSADAPAYQQGQNQLYNELNLGRREEYDVLDKRRGRDPEMGGKPRRKN |
| | PQEGLYNELQKDKMAEAYSEIGMKGERRRGKGHDGLYQGLSTATKDTYDA |
| | LHMQALPPR |
| Exemplary proCAR | MALPVTALLLPLALLLHAARPEVQLLESGGGLVQPGGSLTLSCAASGFIFRAA |
| construct C2483 (SEQ ID | SMAWYRQSPGNERELVASISSGAFTNYADSVKARFTISRDNSKNTLYLQMN |
| No. 838) | SLRAEDTAVYYCGATFLRSDGHHTINGQGTLVTVSSTSDYKDDDDKITTPAP |
| | RPPTPAPTIASQPLSLRPEACRPAAGGAVHTRGLDFACDIYIWAPLAGTCGVL |
| | LLSLVITLYKRGRKKLLYIFKQPFMRPVQTTQEEDGCSCRFPEEEEGGCELRVK |
| | FSRSADAPAYQQGQNQLYNELNLGRREEYDVLDKRRGRDPEMGGKPRRKN |
| | PQEGLYNELQKDKMAEAYSEIGMKGERRRGKGHDGLYQGLSTATKDTYDA |
| | LHMQALPPR |
| Exemplary proCAR | MALPVTALLLPLALLLHAARPEVQLVESGGGLVQPGNSLRLSCAASGFTFSKF |
| construct C2790 (SEQ ID | GMSWVRQAPGKGLEWVSSISGSGRDTLYADSVKGRFTISRDNAKTTLYLQ |
| No. 839) | MNSLRPEDTAVYYCTIGGSLSVSSQGTLVTVSSGSGGSGGGGSGGGGGSGE |
| | VQLLESGGGLVQPGGSLTLSCAASGFIFRAASMAWYRQSPGNERELVASISS |
| | GAFTNYADSVKARFTISRDNSKNTLYLQMNSLRAEDTAVYYCGATFLRSDGH |
| | HTINGQGTLVTVSSTSDYKDDDDKTTTPAPRPPTPAPTIASQPLSLRPEACRP |
| | AAGGAVHTRGLDFACDIYIWAPLAGTCGVLLLSLVITLYKRGRKKLLYIFKQPF |
| | MRPVQTTQEEDGCSCRFPEEEEGGCELRVKFSRSADAPAYQQGQNQLYNE |
| | LNLGRREEYDVLDKRRGRDPEMGGKPRRKNPQEGLYNELQKDKMAEAYSEI |
| | GMKGERRRGKGHDGLYQGLSTATKDTYDALHMQALPPR |
| Exemplary proCAR | MALPVTALLLPLALLLHAARPEVQLVESGGGLVQPGNSLRLSCAASGFTFSKF |
| construct C3269 (SEQ ID | GMSWVRQRQSTFMAMDMPILEWVSSISGSGRDTLYADSVKGRFTISRDNA |
| No. 840) | KTTLYLQMNSLRPEDTAVYYCTIGGSLSVSSQGTLVTVSSGSGGSGGGGSGG |
| | GGGSGEVQLLESGGGLVQPGGSLTLSCAASGFIFRAASMAWYRQSPGNERE |
| | LVASISSGAFTNYADSVKARFTISRDNSKNTLYLQMNSLRAEDTAVYYCGATF |
| | LRSDGHHTINGQGTLVTVSSTSDYKDDDDKTTTPAPRPPTPAPTIASQPLSLR |
| | PEACRPAAGGAVHTRGLDFACDIYIWAPLAGTCGVLLLSLVITLYKRGRKKLLY |
| | IFKQPFMRPVQTTQEEDGCSCRFPEEEEGGCELRVKFSRSADAPAYQQGQN |
| | QLYNELNLGRREEYDVLDKRRGRDPEMGGKPRRKNPQEGLYNELQKDKMA |
| | EAYSEIGMKGERRRGKGHDGLYQGLSTATKDTYDALHMQALPPR |
| Exemplary proCAR | MALPVTALLLPLALLLHAARPEVQLVESGGGLVQPGNSLRLSCAASGFTFSKF |
| construct C3272 (SEQ ID | GMSWVRQQAYWWGNSRDLEWVSSISGSGRDTLYADSVKGRFTISRDNAK |
| No. 841) | TTLYLQMNSLRPEDTAVYYCTIGGSLSVSSQGTLVTVSSGSGGSGGGGSGGG |
| | GGSGEVQLLESGGGLVQPGGSLTLSCAASGFIFRAASMAWYRQSPGNEREL |
| | VASISSGAFTNYADSVKARFTISRDNSKNTLYLQMNSLRAEDTAVYYCGATFL |
| | RSDGHHTINGQGTLVTVSSTSDYKDDDDKTTTPAPRPPTPAPTIASQPLSLRP |
| | EACRPAAGGAVHTRGLDFACDIYIWAPLAGTCGVLLLSLVITLYKRGRKKLLYI |
| | FKQPFMRPVQTTQEEDGCSCRFPEEEEGGCELRVKFSRSADAPAYQQGQN |
| | QLYNELNLGRREEYDVLDKRRGRDPEMGGKPRRKNPQEGLYNELQKDKMA |
| | EAYSEIGMKGERRRGKGHDGLYQGLSTATKDTYDALHMQALPPR |
| Exemplary proCAR | MALPVTALLLPLALLLHAARPEVQLVESGGGLVQPGNSLRLSCAASGFTFSKF |
| construct C3328 (SEQ ID | GMSWVRQQAYWWGNSRDLEWVSSISGSGRDTLYADSVKGRFTISRDNAK |
| No. 842) | TTLYLQMNSLRPEDTAVYYCTIGGSLSVSSQGTLVTVSSGGGGPQGSTGRAA |
| | GGGGGTEVQLLESGGGLVQPGGSLTLSCAASGFIFRAASMAWYRQSPGNE |
| | RELVASISSGAFTNYADSVKARFTISRDNSKNTLYLQMNSLRAEDTAVYYCGA |
| | TFLRSDGHHTINGQGTLVTVSSTSDYKDDDDKTTTPAPRPPTPAPTIASQPLS |
| | LRPEACRPAAGGAVHTRGLDFACDIYIWAPLAGTCGVLLLSLVITLYKRGRKK |
| | LLYIFKQPFMRPVQTTQEEDGCSCRFPEEEEGGCELRVKFSRSADAPAYQQG |
| | QNQLYNELNLGRREEYDVLDKRRGRDPEMGGKPRRKNPQEGLYNELQKDK |
| | [sequence omitted] |
| Exemplary proCAR | MALPVTALLLPLALLLHAARPEVQLVESGGGLVQPGNSLRLSCAASGFTFSKF |
| construct C3329 (SEQ ID | GMSWVRQRQSTFMAMDMPILEWVSSISGSGRDTLYADSVKGRFTISRDNA |
| No. 843) | KTTLYLQMNSLRPEDTAVYYCTIGGSLSVSSQGTLVTVSSGGGGPQGSTGRA |
| | AGGGGGTEVQLLESGGGLVQPGGSLTLSCAASGFIFRAASMAWYRQSPGN |
| | ERELVASISSGAFTNYADSVKARFTISRDNSKNTLYLQMNSLRAEDTAVYYCG |
| | ATFLRSDGHHTINGQGTLVTVSSTSDYKDDDDKITTPAPRPPTPAPTIASQPL |
| | SLRPEACRPAAGGAVHTRGLDFACDIYIWAPLAGTCGVLLLSLVITLYKRGRK |
| | KLLYIFKQPFMRPVQTTQEEDGCSCRFPEEEEGGCELRVKFSRSADAPAYQQ |
| | GQNQLYNELNLGRREEYDVLDKRRGRDPEMGGKPRRKNPQEGLYNELQKD |
| | KMAEAYSEIGMKGERRRGKGHDGLYQGLSTATKDTYDALHMQALPPR |
| dimerization deficient | TTTPAPRPPTPAPTIASQPLSLRPEACRPAAGGAVHTRGLDFASDIYIWAPLA |
| CD8a hinge/TM (SEQ ID | GTCGVLLLSLVITLY |
| No. 844) | |
| protease cleavable | GGGGPPASSGRAGGGGGGT |
| linker 3 (SEQ ID No. 845) | |
| 10G sdAb H90 Mask 1 | EVQLVESGGGLVQPGNSLRLSCAASGFTFSKFGMSWVRQRQSTFMAMDM |
| (SEQ ID No. 846) | PILEWVSSISGSGRDTLYADSVKGRFTISRDNAKTTLYLQMNSLRPEDTAVYY |
| | CTIGGSLSVSSQGTLVTVSS |
| 10G sdAb H90 Mask 2 | EVQLVESGGGLVQPGNSLRLSCAASGFTFSKFGMSWVRQQAYWWGNSRD |
| (SEQ ID No. 847) | LEWVSSISGSGRDTLYADSVKGRFTISRDNAKTTLYLQMNSLRPEDTAVYYCT |
| | IGGSLSVSSQGTLVTVSS |
| H90 sdAb (SEQ ID No. | EVQLLESGGGLVQPGGSLTLSCAASGFIFRAASMAWYRQSPGNERELVASIS |
| 848) | SGAFTNYADSVKARFTISRDNSKNTLYLQMNSLRAEDTAVYYCGATFLRSDG |
| | HHTINGQGTLVTVSS |
| GFP sdAb (SEQ ID No. | QVQLVESGGALVQPGGSLRLSCAASGFPVNRYSMRWYRQAPGKEREWVA |
| 849) | GMSSAGDRSSYEDSVKGRFTISRDDARNTVYLQMNSLKPEDTAVYYCNVNV |
| | GFEYWGQGTQVTVSS |
| H90 Mask 1 (SEQ ID No. | RQSTFMAMDMPI |
| 850) | |
| H90 Mask 2 (SEQ ID No. | QAYWWGNSRD |
| 851) | |
| metalloproteinase | Gly-Pro-Leu-Gly-Ile-Ala-Gly-Gln |
| cleavage site (SEQ ID | |
| No. 852) | |
| metalloproteinase | Ala-Val-Arg-Trp-Leu-Leu-Thr-Ala |
| cleavage site (SEQ ID | |
| No. 853) | |
| furin cleavage site (SEQ | Arg-Arg-Arg-Arg-Arg-Arg |
| ID No. 854) | |
| Exemplary | IYIWAPLAGTCGVLLLSLVITLYC (SEQ ID NO: 94) |
| transmembrane (TM) | |
| sequence (SEQ ID No. | |
| 855) | |
| CD8 beta derived TM | GLLVAGVLVLLVSLGVAIHLCC |
| (SEQ ID No. 856) | |
| CD4 derived TM(SEQ ID | ALIVLGGVAGLLLFIGLGIFFCVRC |
| No. 857) | |
| CD3 zeta derived TM | LCYLLDGILFIYGVILTALFLRV |
| (SEQ ID No. 858) | |
| CD28 derived TM(SEQ | WVLVVVGGVLACYSLLVTVAFIIFWV |
| ID No. 859) | |
| CD134 (0X40) derived | AAILGLGLVLGLLGPLAILLALYLL |
| TM: (SEQ ID No. 860) | |
| CD7 derived TM(SEQ ID | ALPAALAVISFLLGLGLGVACVLA |
| No. 861) | |
| Hinge region (SEQ ID | CPEPKSCDTPPPCPR |
| No. 862) | |
| Hinge region (SEQ ID | ELKTPLGDTTHT |
| No. 863) | |
| Hinge region (SEQ ID | KCCVDCP |
| No. 864) | |
| Hinge region (SEQ ID | KYGPPCP |
| No. 865) | |
| Human IgG1 hinge | EPKSCDKTHTCPPCP |
| region (SEQ ID No. 866) | |
| Human IgG2 hinge | ERKCCVECPPCP |
| region (SEQ ID No. 867) | |
| Human IgG3 hinge | ELKTPLGDTTHTCPRCP |
| region (SEQ ID No. 868) | |
| Human IgG4 hinge | SPNMVPHAHHAQ |
| region (SEQ ID No. 869) | |
| His229 of human IgG1 | EPKSCDKTYTCPPCP |
| hinge region substituted | |
| with Tyr (SEQ ID No. | |
| 870) | |
| CD8 hinge region (SEQ | TTTPAPRPPTPAPTIASQPLSLRPEACRPAAGGAVHTRGLDFACD |
| ID No. 871) | |
| Hinge region (SEQ ID | KSCDKTHTCP |
| No. 872) | |
| Exemplary anti-target | QVQLQESGGGLVQAGGSLRLSCAASGFIFRAASMAWYRQSPGNERELVASI |
| (EpCAM) | SSGAFTNYADSVKARFTISRDNAKNTVYLQMNSLKPEDTAVYFCGATFLRSD |
| (SEQ ID NO: 873) EPL90 | GHHTINGQGTQVTVSS |
| Exemplary anti-target | QVQLQESGGGLVQAGGSLRLSCAASGFIFRAASMGWFRQSPGNERELVAT |
| (EpCAM) | VSSGDFTNYADSVKGRFTISRDNAKNTVYLQMNSLKPEDTAVYFCGATFVRS |
| (SEQ ID NO: 874) | DGHHTIYGQGTQVTVSS |
| EPL118 | |
| Exemplary anti-target | QVQLQESGGGLVQAGGSLRLSCAASGFIFRAASMDWYRQFPGNERESIATI |
| (EpCAM) | SSGGFTNYADSVKGRFTISRDNAKNTVYLQMNSLKPEDTAVYFCGATFLRSD |
| (SEQ ID NO: 875) | GHHTINGQGTQVIVSS |
| EPL138 | |
| Exemplary anti-target | QVQLQESGGGLVQAGGSLRLSCAASGFIFRAASMGWFRQSPGNERELVAT |
| (EpCAM) | VSSGGFTNYADSVKGRFTISRDNAKNTVYLQMNSLKPEDTAVYFCGATFVRS |
| (SEQ ID NO: 876) | DGHHTIYGQGTQVTVSS |
| EPL145 | |
| Exemplary anti-target | QVQLQESGGGLVQAGGSLRLSCAASGFIFRAASMDWYRQSPGTQPELVATI |
| (EpCAM) | SSTGFTNYANSVKGRFTISRDNAKNTVYLQMNSLKPEDTAVYFCGATFLRSD |
| (SEQ ID NO: 877) | GQHSIYGQGTQVTVSS |
| EPL164 | |
| Exemplary anti-target | QVQLQESGGGLVHTGGSLRLSCAASGDTFLRYAMGWFRQAPGKEREFVAA |
| (EpCAM) | ITWNGGNTDYAGSLKGRFTISRDNTKNTVYLQMNSLKPEDTAVYYCAADLT |
| (SEQ ID NO: 878) EPL31 | FGLASSHYQYDYWGQGTQVTVSS |
| Exemplary anti-target | QVQLQESGGGLVQAGGSLRLSCAASGDTFLRYAMGWFRQAPGKEREFVAA |
| (EpCAM) | ITWNGGNTDYAGSLKGRFTISRDNTKNTVYLQMNSLKPEDTAVYYCAADLT |
| (SEQ ID NO: 879) EPL55 | FGLASSHYQYDYWGQGTQVTVSS |
| Exemplary anti-target | QVQLQESGGGLVHTGGSLRLSCAFSGDTFLRYAMGWFRQAPGKEREFVAAI |
| (EpCAM) | TWNGGNTDYADSLKGRFTISRDNTKNTVYLQMNSLRPEDTAVYYCAADLTF |
| (SEQ ID NO: 880) EPL57 | GLASSHYQYDYWGQGTQVTVSS |
| Exemplary anti-target | QVQLQESGGGLVQPGGSLRLSCAASGDTFLRYAMGWFRQAPGKEREFVAA |
| (EpCAM) | ITWNGGNTDYAGSLKGRFTISRDNTKNTVYLQMNSLKPEDTAVYYCAADLT |
| (SEQ ID NO: 881) | FGLASSHYQYDYWGQGTQVTVSS |
| EPL136 | |
| Exemplary anti-target | QVQLQESGGGSVLAGGSLRLSCAASGFTFSSYYMSWVRQAPGKGLEWVSG |
| (EpCAM) | IHYTGDWTNYADSVKGRFTISRDNAKNELYLEMNNLKPEDTAVYYCARGSD |
| (SEQ ID NO: 882) EPL15 | KGQGTQVTVSS |
| Exemplary anti-target | QVQLQESGGGSVQAGGSLRLSCAASGFTFSSYYMSWVRQAPGKGLEWVS |
| (EpCAM) | GIHYTGDWTNYADSVKGRFTISRDNAKNELYLEMNNLKPEDTAVYYCARGS |
| (SEQ ID NO: 883) EPL34 | DKGQGTQVTVSS |
| Exemplary anti-target | QVQLQESGGGLVQPGGSLRLSCAASGFTFSDWAMSWVRQAPGKGLEWVS |
| (EpCAM) | GIHYGDHTTHYADFVKGRFTISRDDAKNTLYLQMNSLKPEDTAVYYCARGST |
| (SEQ ID NO: 884) EPL86 | KGQGTQVTVSS |
| Exemplary anti-target | QVQLQESGGGLVQPGGSLRLSCAASGFTFSDWAMSWVRQAPGKGLEWVS |
| (EpCAM) | SIHYGDHTTHYADFVKGRFTISRDDAKNTLYLQMNSLKPEDTAVYYCEKGTT |
| (SEQ ID NO: 885) | RGQGTQVTVSS |
| EPL153 | |
| Exemplary anti-target | QVQLQESGGGLVQAGGSLKLSCAASGNVFRAATMAWYRQAPEKQREMV |
| (EpCAM) | ATIASGGTTNYADFVKGRFTISRDNAKNTVYLQMNTLKPEDTAVYYCNAGYL |
| (SEQ ID NO: 886) EPL20 | TSLGPKNYWGQGTQVTVSS |
| Exemplary anti-target | QVQLQESGGGLVQPGGSLRLSCAASGNVFRAATMAWYRQAPEKXREMVA |
| (EpCAM) | TIASGGTTNYADFVKGRFTISRDNAKNTVYLQMNTLKPEDTAVYYCNAGYLT |
| (SEQ ID NO: 887) EPL70 | SLGPKNYWGQGTQVTVSS |
| Exemplary anti-target | QVQLQESGGGLVQAGGSLRLSCAASGNVFRAATMAWYRQVPEKQREMV |
| (EpCAM) | ATIASGGTTNYADEVKGRFTISRDNAKNTVYLQMNTLKPEDTAVYYCNALYL |
| (SEQ ID NO: 888) | TSLGPKSYWGQGTQVTVSS |
| EPL125 | |
| Exemplary anti-target | QVQLQESGGGLVQPGGSLRLSCAASGFAFGNHWMYWYRQAPGRGRELV |
| (EpCAM) | ASISSGGSTNYVDSVKGRFTISRDNARNTVYLQMYSLKPEDTAVYYCGTSDN |
| (SEQ ID NO: 889) EPL13 | WGQGTQVTVSS |
| Exemplary anti-target | QVQLQESGGGLVQAGGSLRLSCAASGFAFGNHWMYWYRQAPGRGRELV |
| (EpCAM) | ASISSGGSTNYVDSVKGRFTISRDNARNTVYLQMYSLRPEDTAVYYCGTSDN |
| (SEQ ID NO: 890) | WGQGTQVTVSS |
| EPL129 | |
| Exemplary anti-target | QVQLQESGGGLVQAGGSLRLSCAASGFAFGNHWMYWYRQAPGRGRELV |
| (EpCAM) | ASISSGGSTNYVDSVKGRFTISRDNARNTVYLQMYSLKPEDTAVYYCGTSDN |
| (SEQ ID NO: 891) | WGQGTQVTVSS |
| EPL159 | |
| Exemplary anti-target | QVQLQESGGGLVQAGGSLRLSCAASGFIFRAASISWYRQSPGNERELVATIN |
| (EpCAM) | SGGFTNYADSVLGRFTISRDNAKNTGYLQMNSLKPEDTAVYFCAATFLRSDG |
| (SEQ ID NO: 892) | QPPIWGQGTQVTVSS |
| EPL120 | |
| Exemplary anti-target | QVQLQESGGGLVQAGGSLRLSCAASGFIFRAASMGWYRQSPGNERELVATI |
| (EpCAM) | NSGGETNYADSVKGRFTISRDNAKNTGYLQMNSLKPEDTAVYFCAATFLRSD |
| (SEQ ID NO: 893) | GQPPIWGQGTQVTVSS |
| EPL126 | |
| Exemplary anti-target | QVQLQESGGGLVQAGGSLRLSCAASEYILSMYRMAWYRQAPGKVRELVAD |
| (EpCAM) | MSSGGTTNYADFVKGRFTISRDNDRNTVYLQMNRLQPEDTAAYYCNVAGR |
| (SEQ ID NO: 894) EPL60 | TGPPSYDAFNNWGQGTQVTVSS |
| Exemplary anti-target | QVQLQESGGGLVQPGASLRVSCAASEYILSMYRMAWYRQAPGKVRELVAD |
| (EpCAM) | MSSGGTTNYADFVKGRFTISRDNDRNTVYLQMNRLQPEDTAAYYCNVAGR |
| (SEQ ID NO: 895) | TGPPSYDAFNNWGQGTQVTVSS |
| EPL156 | |
| Exemplary anti-target | QVQLQESGGGLVQPGGSLRLSCAASESISSFIAVGWYRQAPGKERELVAGIN |
| (EpCAM) | RSGFTYYTDSVKGRFSISRDNAKNTVLLQMTSLKPEDTAVYYCNAGGLYFSN |
| (SEQ ID NO: 896) EPL2 | AYTQGDYWGQGTQVTVSS |
| Exemplary anti-target | QVQLQESGGGLVQTGGSLRLSCAASESISSFIAVGWYRQAPGKERELVAGIN |
| (EpCAM) | RSGFTYYTDSVKGRFSISRDNAKNTVLLQMTSLKPEDTAVYYCNAGGLYFSN |
| (SEQ ID NO: 897) EPL43 | AYTQGDYWGQGTQVTVSS |
| Exemplary anti-target | QVQLQESGGGLVQAGGSLRLSCAASGSVFRANVMGWYRQAPGKQHELVA |
| (EpCAM) | RIDPGGTTTYADPVKGRFTISRDNAKKTVYLQMNSLKPDDTAVYYCNAIILLS |
| (SEQ ID NO: 898) EPL10 | GGPKDYWGQGTQVTVSS |
| Exemplary anti-target | QVQLQESGGGLVQAGGSLRLSCAPSGRTSSIFGMGWFRQAPGKEREFVASI |
| (EpCAM) | NWSGGSTSYADSVKGRFTISRDNAKNEMYLQMNSLKFEDTAVYVCAAAVL |
| (SEQ ID NO: 899) EPL49 | TNKPSWNFWGQGTQVTVSS |
| Exemplary anti-target | QVQLQESGGGLVQAGGSLRLSCAASGPIFSDTIRTMGWYRQAAGKQRELV |
| (EpCAM) | ATIASFPSRTNYVDSVKGRFTISRDIAKNTVYLQMDSLKPEDTAVYYCNVDLA |
| (SEQ ID NO: 900) EPL58 | SIPTKTYWGQGTQVTVSS |
| Exemplary anti-target | QVQLQESGGGLVQAGGSLRLSCAASGSIFGINAMGWYRQAPGKQRESVAF |
| (EpCAM) | ITIGGNTNYLDSVKGRFTISRDNAKNTVYLQMNGLKPEDTAVYYCNTNPPLIL |
| (SEQ ID NO: 901) EPL74 | TAGGLYWGQGTQVTVSS |
| Exemplary anti-target | QVQLQESGGGLVQPGGSLRLSCATSANRFNINVMGWYRQAPGQQRELVA |
| (EpCAM) | TINIGGSTDYADSVKGRFTISRDNAKNTVYLQLSDLKPEDTAVYYCNVKLRVS |
| (SEQ ID NO: 902) EPL78 | GPTGPNVYWGQGTQVTVSS |
| Exemplary anti-target | QVQLQESGGGLVQAGGSLKLSCTASGTILSTMAWYRQAPGKQRELVATISR |
| (EpCAM) | GGTTNYSDSVKGRFAISRDSTKNTVYLQMNSLKPEDTAVYYCNTPLTDYGM |
| (SEQ ID NO: 903) EPL82 | GYNWGQGTQVTVSS |
| Exemplary anti-target | QVQLQESGGGLVQAGGSLRLSCAVSGSIFSLNTLAWYRQAPGRQRDLIARIT |
| (EpCAM) | GGGTTVYADSVKGRFTISRDNAKNTVYLQMNSLKPEDTAVYYCNLMVRHPS |
| (SEQ ID NO: 904) EPL83 | GSTYEYWGQGTQVTVSS |
| Exemplary anti-target | QVQLQESGGGLVQAGGSLRLSCAASGIIFRGTTMGWFRQAPGKQRESVASI |
| (EpCAM) | SPLGTTSYSGSVEGRFTVSRDNAKNTLFLQMNSLKSEDTAVYYCNAIQVTNV |
| (SEQ ID NO: 905) EPL97 | GPRVYWGQGTQVTVSS |
| Exemplary anti-target | QVQLQESGGGLVQPGGSLRLSCASSGFTLDDYTIGWFRQAPGKEREGVSCIS |
| (EpCAM) | RRDDSTYYADSVKGRFTISRDNAKNTVDLQMISLRPEDTAVYYCAATPRSYTL |
| (SEQ ID NO: 906) | RCLGKFDFQGQGTQVTVSS |
| EPL109 | |
| Exemplary anti-target | QVQLQESGGGLVQAGGSLRLSCAASGNIVRMTNMAWYRQAPGKQREFVA |
| (EpCAM) | TISAGGSTTYVDSVKDRFTISRDNTKNTVYLQMNYLKPEDTAVYYCATGSILT |
| (SEQ ID NO: 907) | NRGAIPGSWGHGTQVTVSS |
| EPL117 | |
| Exemplary anti-target | QVQLQESGGGLVQAGGSLRLSCAAPGFAFNDHAILWFRQAPGKEREGVSEI |
| (EpCAM) | CRDGTTYYTDSVKGRFTISSDNAKNTVYLQMNSVKTDDTAVYYCAVDRRRY |
| (SEQ ID NO: 908) | YCSGNRAFSSDYYYVVGQGTQVTVSS |
| EPL127 | |
| Exemplary anti-target | QVQLQESGGGLVQAGGSLRLSCVHSGSIFRASTMAWYRQAPGKQRELVAQ |
| (EpCAM) | IMSGGGTNYAGSVKGRFTISRDNANNTVYLQMNSLKPEDTAVYYCNAAQIT |
| (SEQ ID NO: 909) | SWGPKVYWGQGTQVTVSS |
| EPL152 | |
| Exemplary anti-target | QVQLQESGGGLVQPGGSLRLSCAASGRINSINTMGWYRQAPGNQRELVAE |
| (EpCAM) | ITRGGTTNYADSVQGRYAISRDNAKNLVYLQMNSLKPEDTDVYYCNAQTFP |
| (SEQ ID NO: 910) | TFSRPTGLDYWGQGTQVTVSS |
| EPL189 | |
| Exemplary anti- | VVGGGGTQTVVTQEPSLTVSPGGTVTLTCASSTGAVTSGNYPNWVQQKPG |
| EpCAM/Anti-CD3 fusion | QAPRGLIGGTKFLVPGTPARFSGSLLGGKAALTLSGVQPEDEAEYYCTLWYS |
| protein (SEQ ID No. 911) | NRWVFGGGTKLTVLGGGGSGGGGSGGGGSEVQLVESGGGLVQPGGSLKL |
| EPL10 | SCAASGFTFNKYAINWVRQAPGKGLEWVARIRSKYNNYATYYADQVKDRFT |
| | ISRDDSKNTAYLQMNNLKTEDTAVYYCVRHANFGNSYISYWAYWGQGTLV |
| | TVSSGGGGSGGGSQVQLQESGGGLVQAGGSLRLSCAASGSVFRANVMGW |
| | YRQAPGKQHELVARIDPGGTTTYADPVKGRFTISRDNAKKTVYLQMNSLKP |
| | DDTAVYYCNAIILLSGGPKDYWGQGTQVTVSSHHHHHH* |
| Exemplary anti- | VVGGGGTQTVVTQEPSLTVSPGGTVTLTCASSTGAVTSGNYPNWVQQKPG |
| EpCAM/Anti-CD3 fusion | QAPRGLIGGTKFLVPGTPARFSGSLLGGKAALTLSGVQPEDEAEYYCTLWYS |
| protein (SEQ ID No. 912) | NRWVFGGGTKLTVLGGGGSGGGGSGGGGSEVQLVESGGGLVQPGGSLKL |
| EPL109 | SCAASGFTFNKYAINWVRQAPGKGLEWVARIRSKYNNYATYYADQVKDRFT |
| | ISRDDSKNTAYLQMNNLKTEDTAVYYCVRHANFGNSYISYWAYWGQGTLV |
| | TVSSGGGGSGGGSQVQLQESGGGLVQPGGSLRLSCASSGFTLDDYTIGWFR |
| | QAPGKEREGVSCISRRDDSTYYADSVKGRFTISRDNAKNTVDLQMISLRPED |
| | TAVYYCAATPRSYTLRCLGKFDFQGQGTQVTVSSHHHHHH* |
| Exemplary anti- | VVGGGGTQTANTQEPSLTVSPGGTVTLTCASSTGAVTSGNYPNWVQQKPG |
| EpCAM/Anti-CD3 fusion | QAPRGLIGGTKFLVPGTPARFSGSLLGGKAALTLSGVQPEDEAEYYCTLWYS |
| protein (SEQ ID No. 913) | NRWVFGGGTKLTVLGGGGSGGGGSGGGGSEVQLVESGGGLVQPGGSLKL |
| EPL117 | SCAASGFTFNKYAINWVRQAPGKGLEWVARIRSKYNNYATYYADQVKDRFT |
| | ISRDDSKNTAYLQMNNLKTEDTAVYYCVRHANFGNSYISYWAYWGQGTLV |
| | TVSSGGGGSGGGSQVQLQESGGGLVQAGGSLRLSCAASGNIVRMTNMA |
| | WYRQAPGKQREFVATISAGGSTTYVDSVKDRFTISRDNTKNTVYLQMNYLK |
| | PEDTAVYYCATGSILTNRGAIPGSWGHGTQVTVSSHHHHHH* |
| Exemplary anti- | VVGGGGTQTVVTQEPSLTVSPGGTVTLTCASSTGAVTSGNYPNWVQQKPG |
| EpCAM/Anti-CD3 fusion | QAPRGLIGGTKFLVPGTPARFSGSLLGGKAALTLSGVQPEDEAEYYCTLWYS |
| protein (SEQ ID No. 914) | NRWVFGGGTKLTVLGGGGSGGGGSGGGGSEVQLVESGGGLVQPGGSLKL |
| EPL120 | SCAASGFTFNKYAINWVRQAPGKGLEWVARIRSKYNNYATYYADQVKDRFT |
| | ISRDDSKNTAYLQMNNLKTEDTAVYYCVRHANFGNSYISYWAYWGQGTLV |
| | TVSSGGGGSGGGSQVQLQESGGGLVQAGGSLRLSCAASGFIFRAASISWYR |
| | QSPGNERELVATINSGGFTNYADSVLGRFTISRDNAKNTGYLQMNSLKPEDT |
| | AVYFCAATFLRSDGQPPIWGQGTQVTVSSHHHHHH* |
| Exemplary anti- | VVGGGGTQTVVTQEPSLTVSPGGTVTLTCASSTGAVTSGNYPNWVQQKPG |
| EpCAM/Anti-CD3 fusion | QAPRGLIGGTKFLVPGTPARFSGSLLGGKAALTLSGVQPEDEAEYYCTLWYS |
| protein (SEQ ID No. 915) | NRWVFGGGTKLTVLGGGGSGGGGSGGGGSEVQLVESGGGLVQPGGSLKL |
| EPL125 | SCAASGFTFNKYAINWVRQAPGKGLEWVARIRSKYNNYATYYADQVKDRFT |
| | ISRDDSKNTAYLQMNNLKTEDTAVYYCVRHANFGNSYISYWAYWGQGTLV |
| | TVSSGGGGSGGGSQVQLQESGGGLVQAGGSLRLSCAASGNVFRAATMAW |
| | YRQVPEKQREMVATIASGGTTNYADFVKGRFTISRDNAKNTVYLQMNTLKP |
| | EDTAVYYCNALYLTSLGPKSYWGQGTQVTVSSHHHHHH* |
| Exemplary anti- | VVGGGGTQTVVTQEPSLTVSPGGTVTLTCASSTGAVTSGNYPNWVQQKPG |
| EpCAM/Anti-CD3 fusion | QAPRGLIGGTKFLVPGTPARFSGSLLGGKAALTLSGVQPEDEAEYYCTLWYS |
| protein (SEQ ID No. 916) | NRWVFGGGTKLTVLGGGGSGGGGSGGGGSEVQLVESGGGLVQPGGSLKL |
| EPL127 | SCAASGFTFNKYAINWVRQAPGKGLEWVARIRSKYNNYATYYADQVKDRFT |
| | ISRDDSKNTAYLQMNNLKTEDTAVYYCVRHANFGNSYISYWAYWGQGTLV |
| | TVSSGGGGSGGGSQVQLQESGGGLVQAGGSLRLSCAAPGFAFNDHAILWF |
| | RQAPGKEREGVSEICRDGTTYYTDSVKGRFTISSDNAKNTVYLQMNSVKTDD |
| | TAVYYCAVDRRRYYCSGNRAFSSDYYYWGQGTQVTVSSHHHHHH* |
| Exemplary anti- | VVGGGGTQTVVTQEPSLTVSPGGTVTLTCASSTGAVTSGNYPNWVQQKPG |
| EpCAM/Anti-CD3 fusion | QAPRGLIGGTKFLVPGTPARFSGSLLGGKAALTLSGVQPEDEAEYYCTLWYS |
| protein (SEQ ID No. 917) | NRWVFGGGTKLTVLGGGGSGGGGSGGGGSEVQLVESGGGLVQPGGSLKL |
| EPL13 | SCAASGFTFNKYAINWVRQAPGKGLEWVARIRSKYNNYATYYADQVKDRFT |
| | ISRDDSKNTAYLQMNNLKTEDTAVYYCVRHANFGNSYISYWAYWGQGTLV |
| | TVSSGGGGSGGGSQVQLQESGGGLVQPGGSLRLSCAASGFAFGNHWMY |
| | WYRQAPGRGRELVASISSGGSTNYVDSVKGRFTISRDNARNTVYLQMYSLK |
| | PEDTAVYYCGTSDNWGQGTQVIVSSHHHHHH* |
| Exemplary anti- | VVGGGGTQTVVTQEPSLTVSPGGTVTLTCASSTGAVTSGNYPNWVQQKPG |
| EpCAM/Anti-CD3 fusion | QAPRGLIGGTKFLVPGTPARFSGSLLGGKAALTLSGVQPEDEAEYYCTLWYS |
| protein (SEQ ID No. 918) | NRWVFGGGTKLTVLGGGGSGGGGSGGGGSEVQLVESGGGLVQPGGSLKL |
| EPL136 | SCAASGFTFNKYAINWVRQAPGKGLEWVARIRSKYNNYATYYADQVKDRFT |
| | ISRDDSKNTAYLQMNNLKTEDTAVYYCVRHANFGNSYISYWAYWGQGTLV |
| | TVSSGGGGSGGGSQVQLQESGGGLVQPGGSLRLSCAASGDTFLRYAMGW |
| | FRQAPGKEREFVAAITWNGGNTDYAGSLKGRFTISRDNTKNTVYLQMNSLK |
| | PEDTAVYYCAADLTFGLASSHYQYDYWGQGTQVTVSSHHHHHH* |
| Exemplary anti- | VVGGGGTQTVVTQEPSLTVSPGGTVTLTCASSTGAVTSGNYPNWVQQKPG |
| EpCAM/Anti-CD3 fusion | QAPRGLIGGTKFLVPGTPARFSGSLLGGKAALTLSGVQPEDEAEYYCTLWYS |
| protein (SEQ ID No. 919) | NRWVFGGGTKLTVLGGGGSGGGGSGGGGSEVQLVESGGGLVQPGGSLKL |
| EPL138 | SCAASGFTFNKYAINWVRQAPGKGLEWVARIRSKYNNYATYYADQVKDRFT |
| | ISRDDSKNTAYLQMNNLKTEDTAVYYCVRHANFGNSYISYWAYWGQGTLV |
| | TVSSGGGGSGGGSQVQLQESGGGLVQAGGSLRLSCAASGFIFRAASMDWY |
| | RQFPGNERESIATISSGGFTNYADSVKGRFTISRDNAKNTVYLQMNSLKPEDT |
| | AVYFCGATFLRSDGHHTINGQGTQVTVSSHHHHHH* |
| Exemplary anti- | VVGGGGTQTVVTQEPSLTVSPGGTVTLTCASSTGAVTSGNYPNWVQQKPG |
| EpCAM/Anti-CD3 fusion | QAPRGLIGGTKFLVPGTPARFSGSLLGGKAALTLSGVQPEDEAEYYCTLWYS |
| protein (SEQ ID No. 920) | NRWVFGGGTKLTVLGGGGSGGGGSGGGGSEVQLVESGGGLVQPGGSLKL |
| EPL145 | SCAASGFTFNKYAINWVRQAPGKGLEWVARIRSKYNNYATYYADQVKDRFT |
| | ISRDDSKNTAYLQMNNLKTEDTAVYYCVRHANFGNSYISYWAYWGQGTLV |
| | TVSSGGGGSGGGSQVQLQESGGGLVQAGGSLRLSCAASGFIFRAASMGWF |
| | RQSPGNERELVATVSSGGFTNYADSVKGRFTISRDNAKNTVYLQMNSLKPE |
| | DTAVYFCGATFVRSDGHHTIYGQGTQVTVSSHHHHHH* |
| Exemplary anti- | VVGGGGTQTVVTQEPSLTVSPGGTVTLTCASSTGAVTSGNYPNWVQQKPG |
| EpCAM/Anti-CD3 fusion | QAPRGLIGGTKFLVPGTPARFSGSLLGGKAALTLSGVQPEDEAEYYCTLWYS |
| protein (SEQ ID No. 921) | NRWVFGGGTKLTVLGGGGSGGGGSGGGGSEVQLVESGGGLVQPGGSLKL |
| EPL152 | SCAASGFTFNKYAINWVRQAPGKGLEWVARIRSKYNNYATYYADQVKDRFT |
| | ISRDDSKNTAYLQMNNLKTEDTAVYYCVRHANFGNSYISYWAYWGQGTLV |
| | TVSSGGGGSGGGSQVQLQESGGGLVQAGGSLRLSCVHSGSIFRASTMAWY |
| | RQAPGKQRELVAQIMSGGGTNYAGSVKGRFTISRDNANNTVYLQMNSLKP |
| | EDTAVYYCNAAQITSWGPKVYWGQGTQVTVSSHHHHHH* |
| Exemplary anti- | VVGGGGTQTVVTQEPSLTVSPGGTVTLTCASSTGAVTSGNYPNWVQQKPG |
| EpCAM/Anti-CD3 fusion | QAPRGLIGGTKFLVPGTPARFSGSLLGGKAALTLSGVQPEDEAEYYCTLWYS |
| protein (SEQ ID No. 922) | NRWVFGGGTKLTVLGGGGSGGGGSGGGGSEVQLVESGGGLVQPGGSLKL |
| EPL153 | SCAASGFTFNKYAINWVRQAPGKGLEWVARIRSKYNNYATYYADQVKDRFT |
| | ISRDDSKNTAYLQMNNLKTEDTAVYYCVRHANFGNSYISYWAYWGQGTLV |
| | TVSSGGGGSGGGSQVQLQESGGGLVQPGGSLRLSCAASGFTFSDWAMSW |
| | VRQAPGKGLEWVSSIHYGDHTTHYADFVKGRFTISRDDAKNTLYLQMNSLK |
| | PEDTAVYYCEKGTTRGQGTQVTVSSHHHHHH* |
| Exemplary anti- | VVGGGGTQTVVTQEPSLTVSPGGTVTLTCASSTGAVTSGNYPNWVQQKPG |
| EpCAM/Anti-CD3 fusion | QAPRGLIGGTKFLVPGTPARFSGSLLGGKAALTLSGVQPEDEAEYYCTLWYS |
| protein (SEQ ID No. 923) | NRWVFGGGTKLTVLGGGGSGGGGSGGGGSEVQLVESGGGLVQPGGSLKL |
| EPL156 | SCAASGFTFNKYAINWVRQAPGKGLEWVARIRSKYNNYATYYADQVKDRFT |
| | ISRDDSKNTAYLQMNNLKTEDTAVYYCVRHANFGNSYISYWAYWGQGTLV |
| | TVSSGGGGSGGGSQVQLQESGGGLVQPGASLRVSCAASEYILSMYRMAWY |
| | RQAPGKVRELVADMSSGGTTNYADFVKGRFTISRDNDRNTVYLQMNRLQP |
| | EDTAAYYCNVAGRTGPPSYDAFNNWGQGTQVTVSSHHHHHH* |
| Exemplary anti- | VVGGGGTQTVVTQEPSLTVSPGGTVTLTCASSTGAVTSGNYPNWVQQKPG |
| EpCAM/Anti-CD3 fusion | QAPRGLIGGTKFLVPGTPARFSGSLLGGKAALTLSGVQPEDEAEYYCTLWYS |
| protein (SEQ ID No. 924) | NRWVFGGGTKLTVLGGGGSGGGGSGGGGSEVQLVESGGGLVQPGGSLKL |
| EPL164 | SCAASGFTFNKYAINWVRQAPGKGLEWVARIRSKYNNYATYYADQVKDRFT |
| | ISRDDSKNTAYLQMNNLKTEDTAVYYCVRHANFGNSYISYWAYWGQGTLV |
| | TVSSGGGGSGGGSQVQLQESGGGLVQAGGSLRLSCAASGFIFRAASMDWY |
| | RQSPGTQPELVATISSTGFTNYANSVKGRFTISRDNAKNTVYLQMNSLKPED |
| | TAVYFCGATFLRSDGQHSIYGQGTQVTVSSHHHHHH* |
| Exemplary anti- | VVGGGGTQTVVTQEPSLTVSPGGTVTLTCASSTGAVTSGNYPNWVQQKPG |
| EpCAM/Anti-CD3 fusion | QAPRGLIGGTKFLVPGTPARFSGSLLGGKAALTLSGVQPEDEAEYYCTLWYS |
| protein (SEQ ID No. 924) | NRWVFGGGTKLTVLGGGGSGGGGSGGGGSEVQLVESGGGLVQPGGSLKL |
| EPL189 | SCAASGFTFNKYAINWVRQAPGKGLEWVARIRSKYNNYATYYADQVKDRFT |
| | ISRDDSKNTAYLQMNNLKTEDTAVYYCVRHANFGNSYISYWAYWGQGTLV |
| | TVSSGGGGSGGGSQVQLQESGGGLVQPGGSLRLSCAASGRINSINTMGWY |
| | RQAPGNORELVAEITRGGTTNYADSVQGRYAISRDNAKNLVYLQMNSLKPE |
| | DTDVYYCNAQTFPTFSRPTGLDYWGQGTQVTVSSHHHHHH* |
| Exemplary anti- | VVGGGGTQTVVTQEPSLTVSPGGTVTLTCASSTGAVTSGNYPNWVQQKPG |
| EpCAM/Anti-CD3 fusion | QAPRGLIGGTKFLVPGTPARFSGSLLGGKAALTLSGVQPEDEAEYYCTLWYS |
| protein (SEQ ID No. 925) | NRWVFGGGTKLTVLGGGGSGGGGSGGGGSEVQLVESGGGLVQPGGSLKL |
| EPL2 | SCAASGFTFNKYAINWVRQAPGKGLEWVARIRSKYNNYATYYADQVKDRFT |
| | ISRDDSKNTAYLQMNNLKTEDTAVYYCVRHANFGNSYISYWAYWGQGTLV |
| | TVSSGGGGSGGGSQVQLQESGGGLVQPGGSLRLSCAASESISSFIAVGWYR |
| | QAPGKERELVAGINRSGFTYYTDSVKGRFSISRDNAKNTVLLQMTSLKPEDT |
| | AVYYCNAGGLYFSNAYTQGDYWGQGTQVTVSSHHHHHH* |
| Exemplary anti- | VVGGGGTQTVVTQEPSLTVSPGGTVTLTCASSTGAVTSGNYPNWVQQKPG |
| EpCAM/Anti-CD3 fusion | QAPRGLIGGTKFLVPGTPARFSGSLLGGKAALTLSGVQPEDEAEYYCTLWYS |
| protein (SEQ ID No. 926) | NRWVFGGGTKLTVLGGGGSGGGGSGGGGSEVQLVESGGGLVQPGGSLKL |
| EPL20 | SCAASGFTFNKYAINWVRQAPGKGLEWVARIRSKYNNYATYYADQVKDRFT |
| | ISRDDSKNTAYLQMNNLKTEDTAVYYCVRHANFGNSYISYWAYWGQGTLV |
| | TVSSGGGGSGGGSQVQLQESGGGLVQAGGSLKLSCAASGNVFRAATMAW |
| | YRQAPEKQREMVATIASGGTTNYADEVKGRFTISRDNAKNTVYLQMNTLKP |
| | EDTAVYYCNAGYLTSLGPKNYWGQGTQVTVSSHHHHHH* |
| Exemplary anti- | VVGGGGTQTVVTQEPSLTVSPGGTVTLTCASSTGAVTSGNYPNWVQQKPG |
| EpCAM/Anti-CD3 fusion | QAPRGLIGGTKFLVPGTPARFSGSLLGGKAALTLSGVQPEDEAEYYCTLWYS |
| protein (SEQ. ID No. 927) | NRWVFGGGTKLTVLGGGGSGGGGSGGGGSEVQLVESGGGLVQPGGSLKL |
| EPL34 | SCAASGFTFNKYAINWVRQAPGKGLEWVARIRSKYNNYATYYADQVKDRFT |
| | ISRDDSKNTAYLQMNNLKTEDTAVYYCVRHANFGNSYISYWAYWGQGTLV |
| | TVSSGGGGSGGGSQVQLQESGGGSVQAGGSLRLSCAASGFTFSSYYMSWV |
| | RQAPGKGLEWVSGIHYTGDWTNYADSVKGRFTISRDNAKNELYLEMNNLK |
| | PEDTAVYYCARGSDKGQGTQVTVSSHHHHHH* |
| Exemplary anti- | VVGGGGTQTVVTQEPSLTVSPGGTVTLTCASSTGAVTSGNYPNWVQQKPG |
| EpCAM/Anti-CD3 fusion | QAPRGLIGGTKFLVPGTPARFSGSLLGGKAALTLSGVQPEDEAEYYCTLWYS |
| protein (SEQ ID No. 928) | NRWVFGGGTKLTVLGGGGSGGGGSGGGGSEVQLVESGGGLVQPGGSLKL |
| EPL49 | SCAASGFTFNKYAINWVRQAPGKGLEWVARIRSKYNNYATYYADQVKDRFT |
| | ISRDDSKNTAYLQMNNLKTEDTAVYYCVRHANFGNSYISYWAYWGQGTLV |
| | TVSSGGGGSGGGSQVQLQESGGGLVQAGGSLRLSCAPSGRTSSIFGMGWF |
| | RQAPGKEREFVASINWSGGSTSYADSVKGRFTISRDNAKNEMYLQMNSLKF |
| | EDTAVYVCAAAVLTNKPSWNFWGQGTQVTVSSHHHHHH* |
| Exemplary anti- | VVGGGGTQTVVTQEPSLTVSPGGTVTLTCASSTGAVTSGNYPNWVQQKPG |
| EpCAM/Anti-CD3 fusion | QAPRGLIGGTKFLVPGTPARFSGSLLGGKAALTLSGVQPEDEAEYYCTLWYS |
| protein (SEQ ID No. 929) | NRWVFGGGTKLTVLGGGGSGGGGSGGGGSEVQLVESGGGLVQPGGSLKL |
| EPL58 | SCAASGFTFNKYAINWVRQAPGKGLEWVARIRSKYNNYATYYADQVKDRFT |
| | ISRDDSKNTAYLQMNNLKTEDTAVYYCVRHANFGNSYISYWAYWGQGTLV |
| | TVSSGGGGSGGGSQVQLQESGGGLVQAGGSLRLSCAASGPIFSDTIRTMG |
| | WYRQAAGKQRELVATIASFPSRTNYVDSVKGRFTISRDIAKNTVYLQMDSLK |
| | PEDTAVYYCNVDLASIPTKTYWGQGTQVTVSSHHHHHH* |
| Exemplary anti- | VVGGGGTQTVVTQEPSLTVSPGGTVTLTCASSTGAVTSGNYPNWVQQKPG |
| EpCAM/Anti-CD3 fusion | QAPRGLIGGTKFLVPGTPARFSGSLLGGKAALTLSGVQPEDEAEYYCTLWYS |
| protein (SEQ. ID No. 930) | NRWVFGGGTKLTVLGGGGSGGGGSGGGGSEVQLVESGGGLVQPGGSLKL |
| EPL74 | SCAASGFTFNKYAINWVRQAPGKGLEWVARIRSKYNNYATYYADQVKDRFT |
| | ISRDDSKNTAYLQMNNLKTEDTAVYYCVRHANFGNSYISYWAYWGQGTLV |
| | TVSSGGGGSGGGSQVQLQESGGGLVQAGGSLRLSCAASGSIFGINAMGWY |
| | RQAPGKQRESVAFITIGGNTNYLDSVKGRFTISRDNAKNTVYLQMNGLKPED |
| | TAVYYCNTNPPLILTAGGLYWGQGTQVTVSSHHHHHH* |
| Exemplary anti- | VVGGGGTQTVVTQEPSLTVSPGGTVTLTCASSTGAVTSGNYPNWVQQKPG |
| EpCAM/Anti-CD3 fusion | QAPRGLIGGTKFLVPGTPARFSGSLLGGKAALTLSGVQPEDEAEYYCTLWYS |
| protein (SEQ ID No. 931) | NRWVFGGGTKLTVLGGGGSGGGGSGGGGSEVQLVESGGGLVQPGGSLKL |
| EPL78 | SCAASGFTFNKYAINWVRQAPGKGLEWVARIRSKYNNYATYYADQVKDRFT |
| | ISRDDSKNTAYLQMNNLKTEDTAVYYCVRHANFGNSYISYWAYWGQGTLV |
| | TVSSGGGGSGGGSQVQLQESGGGLVQPGGSLRLSCATSANRFNINVMGW |
| | YRQAPGQQRELVATINIGGSTDYADSVKGRFTISRDNAKNTVYLQLSDLKPE |
| | DTAVYYCNVKLRVSGPIGPNVYWGQGTQVTVSSHHHHHH* |
| Exemplary anti- | VVGGGGTQTVVTQEPSLTVSPGGTVTLTCASSTGAVTSGNYPNWVQQKPG |
| EpCAM/Anti-CD3 fusion | QAPRGLIGGTKFLVPGTPARFSGSLLGGKAALTLSGVQPEDEAEYYCTLWYS |
| protein (SEQ ID No. 932) | NRWVFGGGTKLTVLGGGGSGGGGSGGGGSEVQLVESGGGLVQPGGSLKL |
| EPL82 | SCAASGFTFNKYAINWVRQAPGKGLEWVARIRSKYNNYATYYADQVKDRFT |
| | ISRDDSKNTAYLQMNNLKTEDTAVYYCVRHANFGNSYISYWAYWGQGTLV |
| | TVSSGGGGSGGGSQVQLQESGGGLVQAGGSLKLSCTASGTILSTMAWYRQ |
| | APGKQRELVATISRGGTTNYSDSVKGRFAISRDSTKNTVYLQMNSLKPEDTA |
| | VYYCNTPLTDYGMGYNWGQGTQVTVSSHHHHHH* |
| Exemplary anti- | VVGGGGTQTVVTQEPSLTVSPGGTVTLTCASSTGAVTSGNYPNWVQQKPG |
| EpCAM/Anti-CD3 fusion | QAPRGLIGGTKFLVPGTPARFSGSLLGGKAALTLSGVQPEDEAEYYCTLWYS |
| protein (SEQ ID No. 933) | NRWVFGGGTKLTVLGGGGSGGGGSGGGGSEVQLVESGGGLVQPGGSLKL |
| EPL83 | SCAASGFTFNKYAINWVRQAPGKGLEWVARIRSKYNNYATYYADQVKDRFT |
| | ISRDDSKNTAYLQMNNLKTEDTAVYYCVRHANFGNSYISYWAYWGQGTLV |
| | TVSSGGGGSGGGSQVQLQESGGGLVQAGGSLRLSCAVSGSIFSLNTLAWYR |
| | QAPGRQRDLIARITGGGTTVYADSVKGRFTISRDNAKNTVYLQMNSLKPEDT |
| | AVYYCNLMVRHPSGSTYEYWGQGTQVTVSSHHHHHH* |
| Exemplary anti- | VVGGGGTQTVVTQEPSLTVSPGGTVTLTCASSTGAVTSGNYPNWVQQKPG |
| EpCAM/Anti-CD3 fusion | QAPRGLIGGTKFLVPGTPARFSGSLLGGKAALTLSGVQPEDEAEYYCTLWYS |
| protein (SEQ ID No. 934) | NRWVFGGGTKLTVLGGGGSGGGGSGGGGSEVQLVESGGGLVQPGGSLKL |
| EPL86 | SCAASGFTFNKYAINWVRQAPGKGLEWVARIRSKYNNYATYYADQVKDRFT |
| | ISRDDSKNTAYLQMNNLKTEDTAVYYCVRHANFGNSYISYWAYWGQGTLV |
| | TVSSGGGGSGGGSQVQLQESGGGLVQPGGSLRLSCAASGFTFSDWAMSW |
| | VRQAPGKGLEWVSGIHYGDHTTHYADFVKGRFTISRDDAKNTLYLQMNSLK |
| | PEDTAVYYCARGSTKGQGTQVTVSSHHHHHH* |
| Exemplary anti- | VVGGGGTQTVVTQEPSLTVSPGGTVTLTCASSTGAVTSGNYPNWVQQKPG |
| EpCAM/Anti-CD3 fusion | QAPRGLIGGTKFLVPGTPARFSGSLLGGKAALTLSGVQPEDEAEYYCTLWYS |
| protein (SEQ ID No. 935) | NRWVFGGGTKLTVLGGGGSGGGGSGGGGSEVQLVESGGGLVQPGGSLKL |
| EPL90 | SCAASGFTFNKYAINWVRQAPGKGLEWVARIRSKYNNYATYYADQVKDRFT |
| | ISRDDSKNTAYLQMNNLKTEDTAVYYCVRHANFGNSYISYWAYWGQGTLV |
| | TVSSGGGGSGGGSQVQLQESGGGLVQAGGSLRLSCAASGFIFRAASMAWY |
| | RQSPGNERELVASISSGAFTNYADSVKARFTISRDNAKNTVYLQMNSLKPED |
| | TAVYFCGATFLRSDGHHTINGQGTQVTVSSHHHHHH* |
| Exemplary anti- | VVGGGGTQTVVTQEPSLTVSPGGTVTLTCASSTGAVTSGNYPNWVQQKPG |
| EpCAM/Anti-CD3 fusion | QAPRGLIGGTKFLVPGTPARFSGSLLGGKAALTLSGVQPEDEAEYYCTLWYS |
| protein (SEQ ID No. 936) | NRWVFGGGTKLTVLGGGGSGGGGSGGGGSEVQLVESGGGLVQPGGSLKL |
| EPL97 | SCAASGFTFNKYAINWVRQAPGKGLEWVARIRSKYNNYATYYADQVKDRFT |
| | ISRDDSKNTAYLQMNNLKTEDTAVYYCVRHANFGNSYISYWAYWGQGTLV |
| | TVSSGGGGSGGGSQVQLQESGGGLVQAGGSLRLSCAASGIIFRGTTMGWF |
| | RQAPGKQRESVASISPLGTTSYSGSVEGRFTVSRDNAKNTLFLQMNSLKSED |
| | TAVYYCNAIQVTNVGPRVYWGQGTQVTVSSHHHHHH* |
| Exemplary anti- | GGGSQVQLQESGGGLVQAGGSLRLSCAASGSVFRANVMGWYRQAPGKQ |
| CD3/Anti-EpCAM fusion | HELVARIDPGGTTTYADPVKGRFTISRDNAKKTVYLQMNSLKPDDTAVYYCN |
| protein (SEQ ID No. 937) | AIILLSGGPKDYWGQGTQVTVSSGGGGSGGGSEVQLVESGGGLVQPGGSLK |
| EPL10 | LSCAASGFTFNKYAINWVRQAPGKGLEWVARIRSKYNNYATYYADQVKDRF |
| | TISRDDSKNTAYLQMNNLKTEDTAVYYCVRHANFGNSYISYWAYWGQGTL |
| | VTVSSGGGGSGGGGSGGGGSQTVVTQEPSLTVSPGGTVTLTCASSTGAVTS |
| | GNYPNWVQQKPGQAPRGLIGGTKFLVPGTPARFSGSLLGGKAALTLSGVQP |
| | EDEAEYYCTLWYSNRWVFGGGTKLTVLHHHHHH* |
| Exemplary anti- | GGGSQVQLQESGGGLVQPGGSLRLSCASSGFTLDDYTIGWFRQAPGKEREG |
| CD3/Anti-EpCAM fusion | VSCISRRDDSTYYADSVKGRFTISRDNAKNTVDLQMISLRPEDTAVYYCAATP |
| protein (SEQ ID No. 938) | RSYTLRCLGKFDFQGQGTQVTVSSGGGGSGGGSEVQLVESGGGLVQPGGS |
| EPL109 | LKLSCAASGFTFNKYAINWVRQAPGKGLEWVARIRSKYNNYATYYADQVKD |
| | RFTISRDDSKNTAYLQMNNLKTEDTAVYYCVRHANFGNSYISYWAYWGQG |
| | TLVTVSSGGGGSGGGGSGGGGSQTVVTQEPSLTVSPGGTVTLTCASSTGAV |
| | TSGNYPNWVQQKPGQAPRGLIGGTKFLVPGTPARFSGSLLGGKAALTLSGV |
| | QPEDEAEYYCTLWYSNRWVFGGGTKLTVLHHHHHH* |
| Exemplary anti- | GGGSQVQLQESGGGLVQAGGSLRLSCAASGNIVRMTNMAWYRQAPGKQ |
| CD3/Anti-EpCAM fusion | REFVATISAGGSTTYVDSVKDRFTISRDNTKNTVYLQMNYLKPEDTAVYYCAT |
| protein (SEQ ID No. 939) | GSILTNRGAIPGSWGHGTQVTVSSGGGGSGGGSEVQLVESGGGLVQPGGS |
| EPL117 | LKLSCAASGFTFNKYAINWVRQAPGKGLEWVARIRSKYNNYATYYADQVKD |
| | RFTISRDDSKNTAYLQMNNLKTEDTAVYYCVRHANFGNSYISYWAYWGQG |
| | TLVTVSSGGGGSGGGGSGGGGSQTVVTQEPSLTVSPGGTVTLTCASSTGAV |
| | TSGNYPNWVQQKPGQAPRGLIGGTKFLVPGTPARFSGSLLGGKAALTLSGV |
| | QPEDEAEYYCTLWYSNRWVFGGGTKLTVLHHHHHH* |
| Exemplary anti- | GGGSQVQLQESGGGLVQAGGSLRLSCAASGFIFRAASISWYRQSPGNEREL |
| CD3/Anti-EpCAM fusion | VATINSGGFTNYADSVLGRFTISRDNAKNTGYLQMNSLKPEDTAVYFCAATF |
| protein (SEQ ID No. 940) | LRSDGQPPIWGQGTQVTVSSGGGGSGGGSEVQLVESGGGLVQPGGSLKLS |
| EPL120 | CAASGFTFNKYAINWVRQAPGKGLEWVARIRSKYNNYATYYADQVKDRFTI |
| | SRDDSKNTAYLQMNNLKTEDTAVYYCVRHANFGNSYISYWAYWGQGTLVT |
| | VSSGGGGSGGGGSGGGGSQTVVTQEPSLTVSPGGTVTLTCASSTGAVTSGN |
| | YPNWVQQKPGQAPRGLIGGTKFLVPGTPARFSGSLLGGKAALTLSGVQPED |
| | EAEYYCTLWYSNRWVFGGGTKLTVLHHHHHH* |
| Exemplary anti- | GGGSQVQLQESGGGLVQAGGSLRLSCAASGNVFRAATMAWYRQVPEKQR |
| CD3/Anti-EpCAM fusion | EMVATIASGGTTNYADFVKGRFTISRDNAKNTVYLQMNTLKPEDTAVYYCN |
| protein (SEQ ID No. 941) | ALYLTSLGPKSYWGQGTQVTVSSGGGGSGGGSEVQLVESGGGLVQPGGSL |
| EPL125 | KLSCAASGFTFNKYAINWVRQAPGKGLEWVARIRSKYNNYATYYADQVKDR |
| | FTISRDDSKNTAYLQMNNLKTEDTAVYYCVRHANFGNSYISYWAYWGQGTL |
| | VTVSSGGGGSGGGGSGGGGSQTVVTQEPSLTVSPGGTVTLTCASSTGAVTS |
| | GNYPNWVQQKPGQAPRGLIGGTKFLVPGTPARFSGSLLGGKAALTLSGVQP |
| | EDEAEYYCTLWYSNRWVFGGGTKLTVLHHHHHH* |
| Exemplary anti- | GGGSQVQLQESGGGLVQAGGSLRLSCAAPGFAFNDHAILWFRQAPGKERE |
| CD3/Anti-EpCAM fusion | GVSEICRDGTTYYTDSVKGRFTISSDNAKNTVYLQMNSVKTDDTAVYYCAVD |
| protein (SEQ ID No. 942) | RRRYYCSGNRAFSSDYYYWGQGTQVTVSSGGGGSGGGSEVQLVESGGGLV |
| EPL127 | QPGGSLKLSCAASGFTFNKYAINWVRQAPGKGLEWVARIRSKYNNYATYYA |
| | DQVKDRFTISRDDSKNTAYLQMNNLKTEDTAVYYCVRHANFGNSYISYWAY |
| | WGQGTLVTVSSGGGGSGGGGSGGGGSQTVVTQEPSLTVSPGGTVTLTCAS |
| | STGAVTSGNYPNWVQQKPGQAPRGLIGGTKFLVPGTPARFSGSLLGGKAAL |
| | TLSGVQPEDEAEYYCTLWYSNRWVFGGGTKLTVLHHHHHH* |
| Exemplary anti- | GGGSQVQLQESGGGLVQPGGSLRLSCAASGFAFGNHWMYWYRQAPGRG |
| CD3/Anti-EpCAM fusion | RELVASISSGGSTNYVDSVKGRFTISRDNARNTVYLQMYSLKPEDTAVYYCGT |
| protein (SEQ ID No. 943) | SDNWGQGTQVTVSSGGGGSGGGSEVQLVESGGGLVQPGGSLKLSCAASG |
| EPL13 | FTFNKYAINWVRQAPGKGLEWVARIRSKYNNYATYYADQVKDRFTISRDDS |
| | KNTAYLQMNNLKTEDTAVYYCVRHANFGNSYISYWAYWGQGTLVTVSSGG |
| | GGSGGGGSGGGGSQTVVTQEPSLTVSPGGTVTLTCASSTGAVTSGNYPNW |
| | VQQKPGQAPRGLIGGTKFLVPGTPARFSGSLLGGKAALTLSGVQPEDEAEYY |
| | CTLWYSNRWVFGGGTKLTVLHHHHHId* |
| Exemplary anti- | GGGSQVQLQESGGGLVQPGGSLRLSCAASGDTFLRYAMGWFRQAPGKER |
| CD3/Anti-EpCAM fusion | EFVAAITWNGGNTDYAGSLKGRFTISRDNTKNTVYLQMNSLKPEDTAVYYC |
| protein (SEQ ID No. 944) | AADLTFGLASSHYQYDYWGQGTQVTVSSGGGGSGGGSEVQLVESGGGLV |
| EPL136 | QPGGSLKLSCAASGFTFNKYAINWVRQAPGKGLEWVARIRSKYNNYATYYA |
| | DQVKDRFTISRDDSKNTAYLQMNNLKTEDTAVYYCVRHANFGNSYISYWAY |
| | WGQGTLVTVSSGGGGSGGGGSGGGGSQTVVTQEPSLTVSPGGTVTLTCAS |
| | STGAVTSGNYPNWVQQKPGQAPRGLIGGTKFLVPGTPARFSGSLLGGKAAL |
| | TLSGVQPEDEAEYYCTLWYSNRWVFGGGTKLTVLHHHHHH* |
| Exemplary anti- | GGGSQVQLQESGGGLVQAGGSLRLSCAASGFIFRAASMDWYRQFPGNERE |
| CD3/Anti-EpCAM fusion | SIATISSGGFTNYADSVKGRFTISRDNAKNTVYLQMNSLKPEDTAVYFCGATF |
| protein (SEQ ID No. 945) | LRSDGHHTINGQGTQVTVSSGGGGSGGGSEVQLVESGGGLVQPGGSLKLS |
| EPL138 | CAASGFTFNKYAINWVRQAPGKGLEWVARIRSKYNNYATYYADQVKDRFTI |
| | SRDDSKNTAYLQMNNLKTEDTAVYYCVRHANFGNSYISYWAYWGQGTLVT |
| | VSSGGGGSGGGGSGGGGSQTVVTQEPSLTVSPGGTVTLTCASSTGAVTSGN |
| | YPNWVQQKPGQAPRGLIGGTKFLVPGTPARFSGSLLGGKAALTLSGVQPED |
| | EAEYYCTLWYSNRWVFGGGTKLTVLHHHHHH* |
| Exemplary anti- | GGGSQVQLQESGGGLVQAGGSLRLSCAASGFIFRAASMGWFRQSPGNERE |
| CD3/Anti-EpCAM fusion | LVATVSSGGFTNYADSVKGRFTISRDNAKNTVYLQMNSLKPEDTAVYFCGAT |
| protein (SEQ ID No. 946) | FVRSDGHHTIYGQGTQVTVSSGGGGSGGGSEVQLVESGGGLVQPGGSLKLS |
| Exemplary anti- | CAASGFTFNKYAINWVRQAPGKGLEWVARIRSKYNNYATYYADQVKDRFTI |
| CD3/Anti-EpCAM fusion | SRDDSKNTAYLQMNNLKTEDTAVYYCVRHANFGNSYISYWAYWGQGTLVT |
| protein (SEQ ID No. 947) | VSSGGGGSGGGGSGGGGSQTVVTQEPSLTVSPGGTVTLTCASSTGAVTSGN |
| EPL145 | YPNWVQQKPGQAPRGLIGGTKFLVPGTPARFSGSLLGGKAALTLSGVQPED |
| | EAEYYCTLWYSNRWVFGGGTKLTVLHHHHHH* |
| Exemplary anti- | GGGSQVQLQESGGGLVQAGGSLRLSCVHSGSIFRASTMAWYRQAPGKQRE |
| CD3/Anti-EpCAM fusion | LVAQIMSGGGTNYAGSVKGRFTISRDNANNTVYLQMNSLKPEDTAVYYCN |
| protein (SEQ ID No. 948) | AAQITSWGPKVYWGQGTQVTVSSGGGGSGGGSEVQLVESGGGLVQPGGS |
| EPL152 | LKLSCAASGFTFNKYAINWVRQAPGKGLEWVARIRSKYNNYATYYADQVKD |
| | RFTISRDDSKNTAYLQMNNLKTEDTAVYYCVRHANFGNSYISYWAYWGQG |
| | TLVTVSSGGGGSGGGGSGGGGSQTVVTQEPSLTVSPGGTVTLTCASSTGAV |
| | TSGNYPNWVQQKPGQAPRGLIGGTKFLVPGTPARFSGSLLGGKAALTLSGV |
| | QPEDEAEYYCTLWYSNRWVFGGGTKLTVLHHHHHH* |
| Exemplary anti- | GGGSQVQLQESGGGLVQPGGSLRLSCAASGFTFSDWAMSWVRQAPGKGL |
| CD3/Anti-EpCAM fusion | EWVSSIHYGDHTTHYADFVKGRFTISRDDAKNTLYLQMNSLKPEDTAVYYCE |
| protein (SEQ ID No. 949) | KGTTRGQGTQVTVSSGGGGSGGGSEVQLVESGGGLVQPGGSLKLSCAASG |
| EPL153 | FTFNKYAINWVRQAPGKGLEWVARIRSKYNNYATYYADQVKDRFTISRDDS |
| | KNTAYLQMNNLKTEDTAVYYCVRHANFGNSYISYWAYWGQGTLVTVSSGG |
| | GGSGGGGSGGGGSQTVVTQEPSLTVSPGGTVTLTCASSTGAVTSGNYPNW |
| | VQQKPGQAPRGLIGGTKFLVPGTPARFSGSLLGGKAALTLSGVQPEDEAEYY |
| | CTLWYSNRWVFGGGTKLTVLHHHHHH* |
| Exemplary anti- | GGGSQVQLQESGGGLVQPGASLRVSCAASEYILSMYRMAWYRQAPGKVRE |
| CD3/Anti-EpCAM fusion | LVADMSSGGTTNYADFVKGRFTISRDNDRNTVYLQMNRLQPEDTAAYYCN |
| protein (SEQ ID No. 950) | VAGRTGPPSYDAFNNWGQGTQVTVSSGGGGSGGGSEVQLVESGGGLVQP |
| EPL156 | GGSLKLSCAASGFTFNKYAINWVRQAPGKGLEWVARIRSKYNNYATYYADQ |
| | VKDRFTISRDDSKNTAYLQMNNLKTEDTAVYYCVRHANFGNSYISYWAYW |
| | GQGTLVTVSSGGGGSGGGGSGGGGSQTVVTQEPSLTVSPGGTVTLTCASST |
| | GAVTSGNYPNWVQQKPGQAPRGLIGGTKFLVPGTPARFSGSLLGGKAALTL |
| | SGVQPEDEAEYYCTLWYSNRWVFGGGTKLTVLHHHHHH* |
| Exemplary anti- | GGGSQVQLQESGGGLVQAGGSLRLSCAASGFIFRAASMDWYRQSPGTQPE |
| CD3/Anti-EpCAM fusion | LVATISSTGFTNYANSVKGRFTISRDNAKNTVYLQMNSLKPEDTAVYFCGATF |
| protein (SEQ ID No. 951) | LRSDGQHSIYGQGTQVTVSSGGGGSGGGSEVQLVESGGGLVQPGGSLKLSC |
| EPL164 | AASGFTFNKYAINWVRQAPGKGLEWVARIRSKYNNYATYYADQVKDRFTIS |
| | RDDSKNTAYLQMNNLKTEDTAVYYCVRHANFGNSYISYWAYWGQGTLVTV |
| | SSGGGGSGGGGSGGGGSQTVVTQEPSLTVSPGGTVTLTCASSTGAVTSGNY |
| | PNWVQQKPGQAPRGLIGGTKFLVPGTPARFSGSLLGGKAALTLSGVQPEDE |
| | AEYYCTLWYSNRWVFGGGTKLTVLHHHHHH* |
| Exemplary anti- | GGGSQVQLQESGGGLVQPGGSLRLSCAASGRINSINTMGWYRQAPGNQR |
| CD3/Anti-EpCAM fusion | ELVAEITRGGTTNYADSVQGRYAISRDNAKNLVYLQMNSLKPEDTDVYYCN |
| protein (SEQ ID No. 952) | AQTFPTFSRPTGLDYWGQGTQVTVSSGGGGSGGGSEVQLVESGGGLVQPG |
| EPL189 | GSLKLSCAASGFTFNKYAINWVRQAPGKGLEWVARIRSKYNNYATYYADQV |
| | KDRFTISRDDSKNTAYLQMNNLKTEDTAVYYCVRHANFGNSYISYWAYWG |
| | QGTLVTVSSGGGGSGGGGSGGGGSQTVVTQEPSLTVSPGGTVTLTCASSTG |
| | AVTSGNYPNWVQQKPGQAPRGLIGGTKFLVPGTPARFSGSLLGGKAALTLS |
| | GVQPEDEAEYYCTLWYSNRWVFGGGTKLTVLHHHHHH* |
| Exemplary anti- | GGGSQVQLQESGGGLVQPGGSLRLSCAASESISSFIAVGWYRQAPGKERELV |
| CD3/Anti-EpCAM fusion | AGINRSGFTYYTDSVKGRFSISRDNAKNTVLLQMTSLKPEDTAVYYCNAGGL |
| protein (SEQ ID No. 953) | YFSNAYTQGDYWGQGTQVTVSSGGGGSGGGSEVQLVESGGGLVQPGGSL |
| EPL2 | KLSCAASGFTFNKYAINWVRQAPGKGLEWVARIRSKYNNYATYYADQVKDR |
| | FTISRDDSKNTAYLQMNNLKTEDTAVYYCVRHANFGNSYISYWAYWGQGTL |
| | VTVSSGGGGSGGGGSGGGGSQTVVTQEPSLTVSPGGTVTLTCASSTGAVTS |
| | GNYPNWVQQKPGQAPRGLIGGTKFLVPGTPARFSGSLLGGKAALTLSGVQP |
| | EDEAEYYCTLWYSNRWVFGGGTKLTVLHHHHHH* |
| Exemplary anti- | GGGSQVQLQESGGGLVQAGGSLKLSCAASGNVFRAATMAWYRQAPEKQR |
| CD3/Anti-EpCAM fusion | EMVATIASGGTTNYADFVKGRFTISRDNAKNTVYLQMNTLKPEDTAVYYCN |
| protein (SEQ ID No. 954) | AGYLTSLGPKNYWGQGTQVTVSSGGGGSGGGSEVQLVESGGGLVQPGGSL |
| EPL20 | KLSCAASGFTFNKYAINWVRQAPGKGLEWVARIRSKYNNYATYYADQVKDR |
| | FTISRDDSKNTAYLQMNNLKTEDTAVYYCVRHANFGNSYISYWAYWGQGTL |
| | VTVSSGGGGSGGGGSGGGGSQTVVTQEPSLTVSPGGTVTLTCASSTGAVTS |
| | GNYPNWVQQKPGQAPRGLIGGTKFLVPGTPARFSGSLLGGKAALTLSGVQP |
| | EDEAEYYCTLWYSNRWVFGGGTKLTVLHHHHHH* |
| Exemplary anti- | GGGSQVQLQESGGGSVQAGGSLRLSCAASGFTFSSYYMSWVRQAPGKGLE |
| CD3/Anti-EpCAM fusion | WVSGIHYTGDWTNYADSVKGRFTISRDNAKNELYLEMNNLKPEDTAVYYCA |
| protein (SEQ ID No. 955) | RGSDKGQGTQVTVSSGGGGSGGGSEVQLVESGGGLVQPGGSLKLSCAASG |
| EPL34 | FTFNKYAINWVRQAPGKGLEWVARIRSKYNNYATYYADQVKDRFTISRDDS |
| | KNTAYLQMNNLKTEDTAVYYCVRHANFGNSYISYWAYWGQGTLVTVSSGG |
| | GGSGGGGSGGGGSQTVVTQEPSLTVSPGGTVTLTCASSTGAVTSGNYPNW |
| | VQQKPGQAPRGLIGGTKFLVPGTPARFSGSLLGGKAALTLSGVQPEDEAEYY |
| | CTLWYSNRWVFGGGTKLTVLHHHHHH* |
| Exemplary anti- | GGGSQVQLQESGGGLVQAGGSLRLSCAPSGRTSSIFGMGWFRQAPGKERE |
| CD3/Anti-EpCAM fusion | FVASINWSGGSTSYADSVKGRFTISRDNAKNEMYLQMNSLKFEDTAVYVCA |
| protein (SEQ ID No. 956) | AAVLTNKPSWNFWGQGTQVTVSSGGGGSGGGSEVQLVESGGGLVQPGG |
| EPL49 | SLKLSCAASGFTFNKYAINWVRQAPGKGLEWVARIRSKYNNYATYYADQVK |
| | DRFTISRDDSKNTAYLQMNNLKTEDTAVYYCVRHANFGNSYISYWAYWGQ |
| | GTLVTVSSGGGGSGGGGSGGGGSQTVVTQEPSLTVSPGGTVTLTCASSTGA |
| | VTSGNYPNWVQQKPGQAPRGLIGGTKFLVPGTPARFSGSLLGGKAALTLSG |
| | VQPEDEAEYYCTLWYSNRWVFGGGTKLTVLHHHHHH* |
| Exemplary anti- | GGGSQVQLQESGGGLVQAGGSLRLSCAASGPIFSDTIRTMGWYRQAAGKQ |
| CD3/Anti-EpCAM fusion | RELVATIASFPSRTNYVDSVKGRFTISRDIAKNTVYLQMDSLKPEDTAVYYCN |
| protein (SEQ ID No. 957) | VDLASIPTKTYWGQGTQVTVSSGGGGSGGGSEVQLVESGGGLVQPGGSLK |
| EPL58 | LSCAASGFTFNKYAINWVRQAPGKGLEWVARIRSKYNNYATYYADQVKDRF |
| | TISRDDSKNTAYLQMNNLKTEDTAVYYCVRHANFGNSYISYWAYWGQGTL |
| | VTVSSGGGGSGGGGSGGGGSQTVVTQEPSLTVSPGGTVTLTCASSTGAVTS |
| | GNYPNWVQQKPGQAPRGLIGGTKFLVPGTPARFSGSLLGGKAALTLSGVQP |
| | EDEAEYYCTLWYSNRWVFGGGTKLTVLHHHHHH* |
| Exemplary anti- | GGGSQVQLQESGGGLVQAGGSLRLSCAASGSIFGINAMGWYRQAPGKQR |
| CD3/Anti-EpCAM fusion | ESVAFITIGGNTNYLDSVKGRFTISRDNAKNTVYLQMNGLKPEDTAVYYCNT |
| protein (SEQ ID No. 958) | NPPLILTAGGLYWGQGTQVTVSSGGGGSGGGSEVQLVESGGGLVQPGGSL |
| EPL74 | KLSCAASGFTFNKYAINWVRQAPGKGLEWVARIRSKYNNYATYYADQVKDR |
| | FTISRDDSKNTAYLQMNNLKTEDTAVYYCVRHANFGNSYISYWAYWGQGTL |
| | VTVSSGGGGSGGGGSGGGGSQTVVTQEPSLTVSPGGTVTLTCASSTGAVTS |
| | GNYPNWVQQKPGQAPRGLIGGTKFLVPGTPARFSGSLLGGKAALTLSGVQP |
| | EDEAEYYCTLWYSNRWVFGGGTKLTVLHHHHHH* |
| Exemplary anti- | GGGSQVQLQESGGGLVQPGGSLRLSCATSANRFNINVMGWYRQAPGQQR |
| CD3/Anti-EpCAM fusion | ELVATINIGGSTDYADSVKGRFTISRDNAKNTVYLQLSDLKPEDTAVYYCNVK |
| protein (SEQ ID No. 959) | LRVSGPTGPNVYWGQGTQVTVSSGGGGSGGGSEVQLVESGGGLVQPGGS |
| EPL78 | LKLSCAASGFTFNKYAINWVRQAPGKGLEWVARIRSKYNNYATYYADQVKD |
| | RFTISRDDSKNTAYLQMNNLKTEDTAVYYCVRHANFGNSYISYWAYWGQG |
| | TLVTVSSGGGGSGGGGSGGGGSQTVVTQEPSLTVSPGGTVTLTCASSTGAV |
| | TSGNYPNWVQQKPGQAPRGLIGGTKFLVPGTPARFSGSLLGGKAALTLSGV |
| | QPEDEAEYYCTLWYSNRWVFGGGTKLTVLHHHHHH* |
| Exemplary anti- | GGGSQVQLQESGGGLVQAGGSLKLSCTASGTILSTMAWYRQAPGKQRELV |
| CD3/Anti-EpCAM fusion | ATISRGGTTNYSDSVKGRFAISRDSTKNTVYLQMNSLKPEDTAVYYCNTPLTD |
| protein (SEQ ID No. 960) | YGMGYNWGQGTQVTVSSGGGGSGGGSEVQLVESGGGLVQPGGSLKLSCA |
| EPL82 | ASGFTFNKYAINWVRQAPGKGLEWVARIRSKYNNYATYYADQVKDRFTISR |
| | DDSKNTAYLQMNNLKTEDTAVYYCVRHANFGNSYISYWAYWGQGTLVTVS |
| | SGGGGSGGGGSGGGGSQTVVTQEPSLTVSPGGTVTLTCASSTGAVTSGNYP |
| | NWVQQKPGQAPRGLIGGTKFLVPGTPARFSGSLLGGKAALTLSGVQPEDEA |
| | EYYCTLWYSNRWVFGGGTKLTVLHHHHHH* |
| Exemplary anti- | GGGSQVQLQESGGGLVQAGGSLRLSCAVSGSIFSLNTLAWYRQAPGRQRD |
| CD3/Anti-EpCAM fusion | LIARITGGGTTVYADSVKGRFTISRDNAKNTVYLQMNSLKPEDTAVYYCNLM |
| protein (SEQ ID No. 961) | VRHPSGSTYEYWGQGTQVTVSSGGGGSGGGSEVQLVESGGGLVQPGGSLK |
| EPL83 | LSCAASGFTFNKYAINWVRQAPGKGLEWVARIRSKYNNYATYYADQVKDRF |
| | TISRDDSKNTAYLQMNNLKTEDTAVYYCVRHANFGNSYISYWAYWGQGTL |
| | VTVSSGGGGSGGGGSGGGGSQTVVTQEPSLTVSPGGTVTLTCASSTGAVTS |
| | GNYPNWVQQKPGQAPRGLIGGTKFLVPGTPARFSGSLLGGKAALTLSGVQP |
| | EDEAEYYCTLWYSNRWVFGGGTKLTVLHHHHHH* |
| Exemplary anti- | GGGSQVQLQESGGGLVQPGGSLRLSCAASGFTFSDWAMSWVRQAPGKGL |
| CD3/Anti-EpCAM fusion | EWVSGIHYGDHTTHYADFVKGRFTISRDDAKNTLYLQMNSLKPEDTAVYYC |
| protein (SEQ ID No. 962) | ARGSTKGQGTQVTVSSGGGGSGGGSEVQLVESGGGLVQPGGSLKLSCAAS |
| EPL86 | GFTFNKYAINWVRQAPGKGLEWVARIRSKYNNYATYYADQVKDRFTISRDD |
| | SKNTAYLQMNNLKTEDTAVYYCVRHANFGNSYISYWAYWGQGTLVTVSSG |
| | GGGSGGGGSGGGGSQTVVTQEPSLTVSPGGTVTLTCASSTGAVTSGNYPN |
| | WVQQKPGQAPRGLIGGTKFLVPGTPARFSGSLLGGKAALTLSGVQPEDEAE |
| | YYCTLWYSNRWVFGGGTKLTVLHHHHHH* |
| Exemplary anti- | GGGSQVQLQESGGGLVQAGGSLRLSCAASGFIFRAASMAWYRQSPGNERE |
| CD3/Anti-EpCAM fusion | LVASISSGAFTNYADSVKARFTISRDNAKNTVYLQMNSLKPEDTAVYFCGATF |
| protein (SEQ ID No. 963) | LRSDGHHTINGQGTQVTVSSGGGGSGGGSEVQLVESGGGLVQPGGSLKLS |
| EPL90 | CAASGFTFNKYAINWVRQAPGKGLEWVARIRSKYNNYATYYADQVKDRFTI |
| | SRDDSKNTAYLQMNNLKTEDTAVYYCVRHANFGNSYISYWAYWGQGTLVT |
| | VSSGGGGSGGGGSGGGGSQTVVTQEPSLTVSPGGTVTLTCASSTGAVTSGN |
| | YPNWVQQKPGQAPRGLIGGTKFLVPGTPARFSGSLLGGKAALTLSGVQPED |
| | EAEYYCTLWYSNRWVFGGGTKLTVLHHHHHH* |
| Exemplary anti- | GGGSQVQLQESGGGLVQAGGSLRLSCAASGIIFRGTTMGWFRQAPGKQRE |
| CD3/Anti-EpCAM fusion | SVASISPLGTTSYSGSVEGRFTVSRDNAKNTLFLQMNSLKSEDTAVYYCNAIQ |
| protein (SEQ ID No. 964) | VTNVGPRVYWGQGTQVTVSSGGGGSGGGSEVQLVESGGGLVQPGGSLKL |
| EPL97 | SCAASGFTFNKYAINWVRQAPGKGLEWVARIRSKYNNYATYYADQVKDRFT |
| | ISRDDSKNTAYLQMNNLKTEDTAVYYCVRHANFGNSYISYWAYWGQGTLV |
| | TVSSGGGGSGGGGSGGGGSQTVVTQEPSLTVSPGGTVTLTCASSTGAVTSG |
| | NYPNWVQQKPGQAPRGLIGGTKFLVPGTPARFSGSLLGGKAALTLSGVQPE |
| | DEAEYYCTLWYSNRWVFGGGTKLTVLHHHHHH* |
| Exemplary humanized | EVQLVESGGGLVQPGGSLTLSCAASGFAFGNHWMYWYRQAPGRGRELVA |
| EpCAM binder H13 (SEQ | SISSGGSTNYVDSVKGRFTISRDNAKNTLYLQMNSLRAEDTAVYYCGTSDNW |
| ID No. 965) | GQGTLVTVSS |
| Exemplary humanized | EVQLLESGGGLVQPGGSLTLSCAASGFIFRAASMDWYRQFPGNERESIATISS |
| EpCAM binder H138 | GGFTNYADSVKGRFTISRDNSKNTLYLQMNSLRAEDTAVYYCGATFLRSDGH |
| (SEQ ID No. 966) | HTINGQGTLVTVSS |
| Exemplary humanized | EVQLLESGGGLVQPGGSLTLSCAASGFIFRAASMAWYRQSPGNERELVASIS |
| EpCAM binder H90 (SEQ | SGAFTNYADSVKARFTISRDNSKNTLYLQMNSLRAEDTAVYYCGATFLRSDG |
| ID No. 967) | HHTINGQGTLVTVSS |
| Humanized Anti- | VVGGGGTQTVVTQEPSLTVSPGGTVTLTCASSTGAVTSGNYPNWVQQKPG |
| CD3/Anti-EpCAM | QAPRGLIGGTKFLVPGTPARFSGSLLGGKAALTLSGVQPEDEAEYYCTLWYS |
| sequence name H13 | NRWVFGGGTKLTVLGGGGSGGGGSGGGGSEVQLVESGGGLVQPGGSLKL |
| (SEQ ID No. 968) | SCAASGFTFNKYAINWVRQAPGKGLEWVARIRSKYNNYATYYADQVKDRFT |
| | ISRDDSKNTAYLQMNNLKTEDTAVYYCVRHANFGNSYISYWAYWGQGTLV |
| | TVSSGGGGSGGGSEVQLVESGGGLVQPGGSLTLSCAASGFAFGNHWMYW |
| | YRQAPGRGRELVASISSGGSTNYVDSVKGRFTISRDNAKNTLYLQMNSLRAE |
| | DTAVYYCGTSDNWGQGTLVTVSSHHHHHH* |
| Humanized Anti- | VVGGGGTQTVVTQEPSLTVSPGGTVTLTCASSTGAVTSGNYPNWVQQKPG |
| CD3/Anti-EpCAM | QAPRGLIGGTKFLVPGTPARFSGSLLGGKAALTLSGVQPEDEAEYYCTLWYS |
| sequence name H138 | NRWVFGGGTKLTVLGGGGSGGGGSGGGGSEVQLVESGGGLVQPGGSLKL |
| (SEQ ID No. 969) | SCAASGFTFNKYAINWVRQAPGKGLEWVARIRSKYNNYATYYADQVKDRFT |
| | ISRDDSKNTAYLQMNNLKTEDTAVYYCVRHANFGNSYISYWAYWGQGTLV |
| | TVSSGGGGSGGGSEVQLLESGGGLVQPGGSLTLSCAASGFIFRAASMDWYR |
| | QFPGNERESIATISSGGFTNYADSVKGRFTISRDNSKNTLYLQMNSLRAEDTA |
| | VYYCGATFLRSDGHHTINGQGTLVTVSSHHHHHH* |
| Humanized Anti- | VVGGGGTQTVVTQEPSLTVSPGGTVTLTCASSTGAVTSGNYPNWVQQKPG |
| CD3/Anti-EpCAM | QAPRGLIGGTKFLVPGTPARFSGSLLGGKAALTLSGVQPEDEAEYYCTLWYS |
| sequence name H90 | NRWVFGGGTKLTVLGGGGSGGGGSGGGGSEVQLVESGGGLVQPGGSLKL |
| (SEQ ID No. 970) | SCAASGFTFNKYAINWVRQAPGKGLEWVARIRSKYNNYATYYADQVKDRFT |
| | ISRDDSKNTAYLQMNNLKTEDTAVYYCVRHANFGNSYISYWAYWGQGTLV |
| | TVSSGGGGSGGGSEVQLLESGGGLVQPGGSLTLSCAASGFIFRAASMAWYR |
| | QSPGNERELVASISSGAFTNYADSVKARFTISRDNSKNTLYLQMNSLRAEDTA |
| | VYYCGATFLRSDGHHTINGQGTLVTVSSHHHHHH* |
| HuCD3e | QDGNEEMGGITQ |
| (SEQ ID No. 989) | |
| AB loop oligo WT: | LVQPGN |
| SEQ ID No. 990 | |
| C″D loop oligo WT: | DSVKGR |
| SEQ ID No.990 | |
| EF loop oligo WT: | SLRPED |
| SEQ ID No. 991 | |
| EpCAM H90 TriTAC | EVQLVESGGGLVQPGNSLRLSCAASGFTFSKFGMSWVRQAPGKGLEWVSSISGSGR |
| C2854 | DTLYADSVKGRFTISRDNAKTTLYLQMNSLRPEDTAVYYCTIGGSLSVSSQGTLVT |
| (SEQ ID No. 992) | VSSGGGGSGGGSQTVVTQEPSLTVSPGGTVTLTCASSTGAVTSGNYPNWVQQKPGQ |
| | APRGLIGGTKFLVPGTPARFSGSLLGGKAALTLSGVQPEDEAEYYCTLWYSNRWVF |
| | GGGTKLTVLGGGGSGGGGSGGGGSEVQLVESGGGLVQPGGSLKLSCAASGFTFNKY |
| | AINWVRQAPGKGLEWVARIRSKYNNYATYYADQVKDRFTISRDDSKNTAYLQMNNL |
| | KTEDTAVYYCVRHANFGNSYISYWAYWGQGTLVTVSSGGGGSGGGSEVQLLESGGG |
| | LVQPGGSLTLSCAASGFIFRAASMAWYRQSPGNERELVASISSGAFTNYADSVKAR |
| | FTISRDNSKNTLYLQMNSLRAEDTAVYYCGATFLRSDGHHTINGQGTLVTVSSHHH |
| | HHH |
| EpCAM H90 ProTriTAC | QTVVTQEPSLTVSPGGTVTLTCASSTGAVTSGNYPNWVQQKPGQAPRGLIGGTKFL |
| (L040) C2704 | VPGTPARFSGSLLGGKAALTLSGVQPEDEAEYYCTLWYSNRWVFGGGTKLTVLGGG |
| (SEQ ID No. 993) | GSGGGGSGGGGSEVQLVESGGGLVQPGGSLKLSCAASGFTFNKYAINWVRQAPGKG |
| | LEWVARIRSKYNNYATYYADQVKDRFTISRDDSKNTAYLQMNNLKTEDTAVYYCVR |
| | HANFGNSYISYWAYWGQGTLVTVSSGGGGSGGGSEVQLLESGGGLVQPGGSLTLSC |
| | AASGFIFRAASMAWYRQSPGNERELVASISSGAFTNYADSVKARFTISRDNSKNTL |
| | YLQMNSLRAEDTAVYYCGATFLRSDGHHTINGQGTLVTVSSHHHHHH |
| EpCAM H90 ProTriTAC | EVQLVESGGGLVQPGNSLRLSCAASGFTFSKFGMSWVRQGGGGGLDGNEEPGGLEW |
| (NCLV) C2302 | VSSISGSGRDTLYADSVKGRFTISRDNAKTTLYLQMNSLRPEDTAVYYCTIGGSLS |
| (SEQ ID No. 994) | VSSQGTLVTVSSGGGGSGGGGSGGVVGGGGTQTVVTQEPSLTVSPGGTVTLTCASS |
| | TGAVTSGNYPNWVQQKPGQAPRGLIGGTKFLVPGTPARFSGSLLGGKAALTLSGVQ |
| | PEDEAEYYCTLWYSNRWVFGGGTKLTVLGGGGSGGGGSGGGGSEVQLVESGGGLVQ |
| | PGGSLKLSCAASGFTFNKYAINWVRQAPGKGLEWVARIRSKYNNYATYYADQVKDR |
| | FTISRDDSKNTAYLQMNNLKTEDTAVYYCVRHANFGNSYISYWAYWGQGTLVTVSS |
| | GGGGSGGGSEVQLLESGGGLVQPGGSLTLSCAASGFTFRAASMAWYRQSPGNEREL |
| | VASISSGAFTNYADSVKARFTISRDNSKNTLYLQMNSLRAEDTAVYYCGATFLRSD |
| | GHHTINGQGTLVTVSSHHHHHH |

The application's sequence listing, which the Patent Office published only in electronic form, follows.

SEQUENCE LISTING (1236 sequences)

SEQ ID NO: 1 - protein, 8 aa, Unknown
  Description of Unknown: Protease cleavage site sequence
KRALGLPG

SEQ ID NO: 2 - protein, 40 aa, Unknown
  Description of Unknown: Protease cleavage site sequence
DEDEDEDEDEDEDEDERPLALWRSDRDRDRDRDRDRDRDR

SEQ ID NO: 3 - protein, 5 aa, Unknown
  Description of Unknown: Protease cleavage site sequence
  MOD_RES (3)..(3): Ser or Thr
  MOD_RES (4)..(4): Leu or Ile
  MOD_RES (5)..(5): Ser or Thr
PRXXX

SEQ ID NO: 4 - protein, 5 aa, Unknown
  Description of Unknown: Protease cleavage site sequence
LEATA

SEQ ID NO: 5 - protein, 10 aa, Unknown
  Description of Unknown: Protease cleavage site sequence
GGAANLVRGG

SEQ ID NO: 6 - protein, 10 aa, Unknown
  Description of Unknown: Protease cleavage site sequence
SGRIGFLRTA

SEQ ID NO: 7 - protein, 6 aa, Unknown
  Description of Unknown: Protease cleavage site sequence
PLGLAG

SEQ ID NO: 8 - protein, 6 aa, Unknown
  Description of Unknown: Protease cleavage site sequence
  MOD_RES (6)..(6): Any amino acid
PLGLAX

SEQ ID NO: 9 - protein, 6 aa, Unknown
  Description of Unknown: Protease cleavage site sequence
PLGCAG

SEQ ID NO: 10 - protein, 8 aa, Unknown
  Description of Unknown: Protease cleavage site sequence
ESPAYYTA

SEQ ID NO: 11 - protein, 6 aa, Unknown
  Description of Unknown: Protease cleavage site sequence
RLQLKL

SEQ ID NO: 12 - protein, 7 aa, Unknown
  Description of Unknown: Protease cleavage site sequence
RLQLKAC

SEQ ID NO: 13 - protein, 7 aa, Unknown
  Description of Unknown: Protease cleavage site sequence
  MOD_RES (3)..(3): Cit
  MOD_RES (5)..(5): Hof
EPXGXYL

SEQ ID NO: 14 - protein, 5 aa, Unknown
  Description of Unknown: Protease cleavage site sequence
SGRSA

SEQ ID NO: 15 - protein, 4 aa, Unknown
  Description of Unknown: Protease cleavage site sequence
DAFK

SEQ ID NO: 16 - protein, 5 aa, Unknown
  Description of Unknown: Protease cleavage site sequence
GGGRR

SEQ ID NO: 17 - protein, 4 aa, Unknown
  Description of Unknown: Protease cleavage site sequence
GFLG

SEQ ID NO: 18 - protein, 4 aa, Unknown
  Description of Unknown: Protease cleavage site sequence
ALAL

SEQ ID NO: 19 - protein, 2 aa, Unknown
  Description of Unknown: Protease cleavage site sequence
FK

SEQ ID NO: 20 - protein, 3 aa, Unknown
  Description of Unknown: Protease cleavage site sequence
NLL

SEQ ID NO: 21 - protein, 5 aa, Unknown
  Description of Unknown: Protease cleavage site sequence
PICFF

SEQ ID NO: 22 - protein, 8 aa, Unknown
  Description of Unknown: Protease cleavage site sequence
GGPRGLPG

SEQ ID NO: 23 - protein, 6 aa, Unknown
  Description of Unknown: Protease cleavage site sequence
HSSKLQ

SEQ ID NO: 24 - protein, 7 aa, Unknown
  Description of Unknown: Protease cleavage site sequence
HSSKLQL

SEQ ID NO: 25 - protein, 9 aa, Unknown
  Description of Unknown: Protease cleavage site sequence
HSSKLQEDA

SEQ ID NO: 26 - protein, 10 aa, Unknown
  Description of Unknown: Protease cleavage site sequence
LVLASSSFGY

SEQ ID NO: 27 - protein, 10 aa, Unknown
  Description of Unknown: Protease cleavage site sequence
GVSQNYPIVG

SEQ ID NO: 28 - protein, 10 aa, Unknown
  Description of Unknown: Protease cleavage site sequence
GVVQASCRLA

SEQ ID NO: 29 - protein, 4 aa, Unknown
  Description of Unknown: Protease cleavage site sequence
  MOD_RES (2)..(2): Pip
FXRS

SEQ ID NO: 30 - protein, 6 aa, Unknown
  Description of Unknown: Protease cleavage site sequence
DPRSFL

SEQ ID NO: 31 - protein, 6 aa, Unknown
  Description of Unknown: Protease cleavage site sequence
PPRSFL

SEQ ID NO: 32 - protein, 4 aa, Unknown
  Description of Unknown: Protease cleavage site sequence
DEVD

SEQ ID NO: 33 - protein, 5 aa, Unknown
  Description of Unknown: Protease cleavage site sequence
DEVDP

SEQ ID NO: 34 - protein, 8 aa, Unknown
  Description of Unknown: Protease cleavage site sequence
KGSGDVEG

SEQ ID NO: 35 - protein, 6 aa, Unknown
  Description of Unknown: Protease cleavage site sequence
GWEHDG

SEQ ID NO: 36 - protein, 7 aa, Unknown
  Description of Unknown: Protease cleavage site sequence
EDDDDKA

SEQ ID NO: 37 - protein, 9 aa, Unknown
  Description of Unknown: Protease cleavage site sequence
KQEQNPGST

SEQ ID NO: 38 - protein, 6 aa, Unknown
  Description of Unknown: Protease cleavage site sequence
GKAFRR

SEQ ID NO: 39 - protein, 4 aa, Unknown
  Description of Unknown: Protease cleavage site sequence
DAFK

SEQ ID NO: 40 - protein, 4 aa, Unknown
  Description of Unknown: Protease cleavage site sequence
DVLK

SEQ ID NO: 41 - protein, 4 aa, Unknown
  Description of Unknown: Protease cleavage site sequence
DAFK

SEQ ID NO: 42 - protein, 7 aa, Unknown
  Description of Unknown: Protease cleavage site sequence
ALLLALL

SEQ ID NO: 43 - protein, 518 aa, Artificial Sequence
  Description of Artificial Sequence: Synthetic polypeptide
EVQLVESGGGLVQPGNSLRLSCAASGFTFSKFGMSWVRQGGGGGLDGNEEPGGLEWVSSISGSGRDTLYADSVKGRFTISRDNAKTTLYLQMNSLRPEDTAVYYCTIGGSLSVSSQGTLVTVSSGGGGKPLGLQARVVGGGGTQTVVTQEPSLTVSPGGTVTLTCASSTGAVTSGNYPNWVQQKPGQAPRGLIGGTKFLVPGTPARFSGSLLGGKAALTLSGVQPEDEAEYYCTLWYSNRWVFGGGTKLTVLGGGGSGGGGSGGGGSEVQLVESGGGLVQPGGSLKLSCAASGFTFNKYAINWVRQAPGKGLEWVARIRSKYNNYATYYADQVKDRFTISRDDSKNTAYLQMNNLKTEDTAVYYCVRHANFGNSYISYWAYWGQGTLVTVSSGGGGSGGGSEVQLVESGGGLVQPGGSLTLSCAASRFMISEYHMHWVRQAPGKGLEWVSTINPAGTTDYAESVKGRFTISRDNAKNTLYLQMNSLKPEDTAVYYCDSYGYRGQGTQVTVSSHHHHHH

SEQ ID NO: 44 - protein, 518 aa, Artificial Sequence
  Description of Artificial Sequence: Synthetic polypeptide
EVQLVESGGGLVQPGNSLRLSCAASGFTFSKFGMSWVRQGGGGGLDGNEEPGGLEWVSSISGSGRDTLYADSVKGRFTISRDNAKTTLYLQMNSLRPEDTAVYYCTIGGSLSVSSQGTLVTVSSGGGGSGGGGSGGVVGGGGTQTVVTQEPSLTVSPGGTVTLTCASSTGAVTSGNYPNWVQQKPGQAPRGLIGGTKFLVPGTPARFSGSLLGGKAALTLSGVQPEDEAEYYCTLWYSNRWVFGGGTKLTVLGGGGSGGGGSGGGGSEVQLVESGGGLVQPGGSLKLSCAASGFTFNKYAINWVRQAPGKGLEWVARIRSKYNNYATYYADQVKDRFTISRDDSKNTAYLQMNNLKTEDTAVYYCVRHANFGNSYISYWAYWGQGTLVTVSSGGGGSGGGSEVQLVESGGGLVQPGGSLTLSCAASRFMISEYHMHWVRQAPGKGLEWVSTINPAGTTDYAESVKGRFTISRDNAKNTLYLQMNSLKPEDTAVYYCDSYGYRGQGTQVTVSSHHHHHH

SEQ ID NO: 45 - protein, 382 aa, Artificial Sequence
  Description of Artificial Sequence: Synthetic polypeptide
VVGGGGTQTVVTQEPSLTVSPGGTVTLTCASSTGAVTSGNYPNWVQQKPGQAPRGLIGGTKFLVPGTPARFSGSLLGGKAALTLSGVQPEDEAEYYCTLWYSNRWVFGGGTKLTVLGGGGSGGGGSGGGGSEVQLVESGGGLVQPGGSLKLSCAASGFTFNKYAINWVRQAPGKGLEWVARIRSKYNNYATYYADQVKDRFTISRDDSKNTAYLQMNNLKTEDTAVYYCVRHANFGNSYISYWAYWGQGTLVTVSSGGGGSGGGSEVQLVESGGGLVQPGGSLTLSCAASRFMISEYHMHWVRQAPGKGLEWVSTINPAGTTDYAESVKGRFTISRDNAKNTLYLQMNSLKPEDTAVYYCDSYGYRGQGTQVTVSSHHHHHH

SEQ ID NO: 46 - protein, 534 aa, Artificial Sequence
  Description of Artificial Sequence: Synthetic polypeptide
EVQLVESGGGLVQPGNSLRLSCAASGFTFSKFGMSWVRQGGGGGLDGNEEPGGLEWVSSISGSGRDTLYADSVKGRFTISRDNAKTTLYLQMNSLRPEDTAVYYCTIGGSLSVSSQGTLVTVSSGGGGKPLGLQARVVGGGGTQTVVTQEPSLTVSPGGTVTLTCASSTGAVTSGNYPNWVQQKPGQAPRGLIGGTKFLVPGTPARFSGSLLGGKAALTLSGVQPEDEAEYYCTLWYSNRWVFGGGTKLTVLGGGGSGGGGSGGGGSEVQLVESGGGLVQPGGSLKLSCAASGFTFNKYAINWVRQAPGKGLEWVARIRSKYNNYATYYADQVKDRFTISRDDSKNTAYLQMNNLKTEDTAVYYCVRHANFGNSYISYWAYWGQGTLVTVSSGGGGSGGGSEVQLVESGGGLVQPGGSLTLSCAASGRTFSSYAMGWFRQAPGKEREFVVAINWASGSTYYADSVKGRFTISRDNSKNTLYLQMNSLRAEDTAVYYCAAGYQINSGNYNFKDYEYDYWGQGTLVTVSSHHHHHH

SEQ ID NO: 47 - protein, 534 aa, Artificial Sequence
  Description of Artificial Sequence: Synthetic polypeptide
EVQLVESGGGLVQPGNSLRLSCAASGFTFSKFGMSWVRQGGGGGLDGNEEPGGLEWVSSISGSGRDTLYADSVKGRFTISRDNAKTTLYLQMNSLRPEDTAVYYCTIGGSLSVSSQGTLVTVSSGGGGSGGGGSGGVVGGGGTQTVVTQEPSLTVSPGGTVTLTCASSTGAVTSGNYPNWVQQKPGQAPRGLIGGTKFLVPGTPARFSGSLLGGKAALTLSGVQPEDEAEYYCTLWYSNRWVFGGGTKLTVLGGGGSGGGGSGGGGSEVQLVESGGGLVQPGGSLKLSCAASGFTFNKYAINWVRQAPGKGLEWVARIRSKYNNYATYYADQVKDRFTISRDDSKNTAYLQMNNLKTEDTAVYYCVRHANFGNSYISYWAYWGQGTLVTVSSGGGGSGGGSEVQLVESGGGLVQPGGSLTLSCAASGRTFSSYAMGWFRQAPGKEREFVVAINWASGSTYYADSVKGRFTISRDNSKNTLYLQMNSLRAEDTAVYYCAAGYQINSGNYNFKDYEYDYWGQGTLVTVSSHHHHHH

SEQ ID NO: 48 - protein, 398 aa, Artificial Sequence
  Description of Artificial Sequence: Synthetic polypeptide
VVGGGGTQTVVTQEPSLTVSPGGTVTLTCASSTGAVTSGNYPNWVQQKPGQAPRGLIGGTKFLVPGTPARFSGSLLGGKAALTLSGVQPEDEAEYYCTLWYSNRWVFGGGTKLTVLGGGGSGGGGSGGGGSEVQLVESGGGLVQPGGSLKLSCAASGFTFNKYAINWVRQAPGKGLEWVARIRSKYNNYATYYADQVKDRFTISRDDSKNTAYLQMNNLKTEDTAVYYCVRHANFGNSYISYWAYWGQGTLVTVSSGGGGSGGGSEVQLVESGGGLVQPGGSLTLSCAASGRTFSSYAMGWFRQAPGKEREFVVAINWASGSTYYADSVKGRFTISRDNSKNTLYLQMNSLRAEDTAVYYCAAGYQINSGNYNFKDYEYDYWGQGTLVTVSSHHHHHH

SEQ ID NO: 49 - protein, 503 aa, Artificial Sequence
  Description of Artificial Sequence: Synthetic polypeptide
QVQLVESGGALVQPGGSLRLSCAASGFPVNRYSMRWYRQAPGKEREWVAGMSSAGDRSSYEDSVKGRFTISRDDARNTVYLQMNSLKPEDTAVYYCNVNVGFEYWGQGTQVTVSSGGGGSGGGSEVQLVESGGGLVQPGNSLRLSCAASGFTFSKFGMSWVRQAPGKGLEWVSSISGSGRDTLYADSVKGRFTISRDNAKTTLYLQMNSLRPEDTAVYYCTIGGSLSVSSQGTLVTVSSGGGGSGGGSEVQLVESGGGLVQPGGSLKLSCAASGFTFNKYAINWVRQAPGKGLEWVARIRSKYNNYATYYADQVKDRFTISRDDSKNTAYLQMNNLKTEDTAVYYCVRHANFGNSYISYWAYWGQGTLVTVSSGGGGSGGGGSGGGGSQTVVTQEPSLTVSPGGTVTLTCASSTGAVTSGNYPNWVQQKPGQAPRGLIGGTKFLVPGTPARFSGSLLGGKAALTLSGVQPEDEAEYYCTLWYSNRWVFGGGTKLTVLHHHHHH

SEQ ID NO: 50 - protein, 14 aa, Artificial Sequence
  Description of Artificial Sequence: Synthetic peptide
GGGGGLDGNEEPGG

SEQ ID NO: 51 - protein, 19 aa, Artificial Sequence
  Description of Artificial Sequence: Synthetic peptide
GGGGSGGGGSGGVVGGGGT

SEQ ID NO: 52 - protein, 509 aa, Artificial Sequence
  Description of Artificial Sequence: Synthetic polypeptide
EVQLVESGGGLVQPGNSLRLSCAASGFTFSKFGMSWVRQAPGKGLEWVSSISGSGRDTLYADSVKGRFTISRDNAKTTLYLQMNSLRPEDTAVYYCTIGGSLSVSSQGTLVTVSSGGGGSGGGGSGGVVGGGGTQTVVTQEPSLTVSPGGTVTLTCASSTGAVTSGNYPNWVQQKPGQAPRGLIGGTKFLVPGTPARFSGSLLGGKAALTLSGVQPEDEAEYYCTLWYSNRWVFGGGTKLTVLGGGGSGGGGSGGGGSEVQLVESGGGLVQPGGSLKLSCAASGFTFNKYAINWVRQAPGKGLEWVARIRSKYNNYATYYADQVKDRFTISRDDSKNTAYLQMNNLKTEDTAVYYCVRHANFGNSYISYWAYWGQGTLVTVSSGGGGSGGGSEVQLVESGGGLVQPGGSLTLSCAASRFMISEYHMHWVRQAPGKGLEWVSTINPAGTTDYAESVKGRFTISRDNAKNTLYLQMNSLKPEDTAVYYCDSYGYRGQGTQVTVSSHHHHHH

SEQ ID NO: 53 - protein, 19 aa, Artificial Sequence
  Description of Artificial Sequence: Synthetic peptide
GGGGKPLGLQARVVGGGGT

SEQ ID NO: 54 - protein, 143 aa, Artificial Sequence
  Description of Artificial Sequence: Synthetic polypeptide
EVQLVESGGGLVQPGNSLRLSCAASGFTFSKFGMSWVRQGGGGGLDGNEEPGGLEWVSSISGSGRDTLYADSVKGRFTISRDNAKTTLYLQMNSLRPEDTAVYYCTIGGSLSVSSQGTLVTVSSGGGGKPLGLQARVVGGGGT

SEQ ID NO: 55 - protein, 127 aa, Artificial Sequence
  Description of Artificial Sequence: Synthetic polypeptide
EVQLVESGGGLVQPGGSLTLSCAASGRTFSSYAMGWFRQAPGKEREFVVAINWASGSTYYADSVKGRFTISRDNSKNTLYLQMNSLRAEDTAVYYCAAGYQINSGNYNFKDYEYDYWGQGTLVTVSS

SEQ ID NO: 56 - protein, 249 aa, Artificial Sequence
  Description of Artificial Sequence: Synthetic polypeptide
QTVVTQEPSLTVSPGGTVTLTCASSTGAVTSGNYPNWVQQKPGQAPRGLIGGTKFLVPGTPARFSGSLLGGKAALTLSGVQPEDEAEYYCTLWYSNRWVFGGGTKLTVLGGGGSGGGGSGGGGSEVQLVESGGGLVQPGGSLKLSCAASGFTFNKYAINWVRQAPGKGLEWVARIRSKYNNYATYYADQVKDRFTISRDDSKNTAYLQMNNLKTEDTAVYYCVRHANFGNSYISYWAYWGQGTLVTVSS

SEQ ID NO: 57 - protein, 111 aa, Artificial Sequence
  Description of Artificial Sequence: Synthetic polypeptide
EVQLVESGGGLVQPGGSLTLSCAASRFMISEYHMHWVRQAPGKGLEWVSTINPAGTTDYAESVKGRFTISRDNAKNTLYLQMNSLKPEDTAVYYCDSYGYRGQGTQVTVSS

SEQ ID NO: 58 - protein, 10 aa, Unknown
  Description of Unknown: Protease cleavage site sequence
KPLGLQARVV

SEQ ID NO: 59 - protein, 10 aa, Unknown
  Description of Unknown: Protease cleavage site sequence
PQASTGRSGG

SEQ ID NO: 60 - protein, 10 aa, Unknown
  Description of Unknown: Protease cleavage site sequence
PQGSTGRAAG

SEQ ID NO: 61 - protein, 10 aa, Unknown
  Description of Unknown: Protease cleavage site sequence
PPASSGRAGG

SEQ ID NO: 62 - protein, 9 aa, Unknown
  Description of Unknown: Protease cleavage site sequence
PIPVQGRAH

SEQ ID NO: 63 - protein, 111 aa, Artificial Sequence
  Description of Artificial Sequence: Synthetic polypeptide
EVQLVESGGGLVQPGGSLRLSCAASRFMISEYHMHWVRQAPGKGLEWVSDINPAGTTDYAESVKGRFTISRDNAKNTLYLQMNSLRAEDTAVYYCDSYGYRGQGTLVTVSS

SEQ ID NO: 64 - protein, 111 aa, Artificial Sequence
  Description of Artificial Sequence: Synthetic polypeptide
EVQLVESGGGLVQPGGSLRLSCAASRFMISEYHMHWVRQAPGKGLEWVSTINPAGTTDYAESVKGRFTISRDNAKNTLYLQMNSLRAEDTAVYYCDSYGYRGQGTLVTVSS

SEQ ID NO: 65 - protein, 111 aa, Artificial Sequence
  Description of Artificial Sequence: Synthetic polypeptide
EVQLVESGGGLVQPGGSLRLSCAASRFMISEYSMHWVRQAPGKGLEWVSTINPAKTTDYAESVKGRFTISRDNAKNTLYLQMNSLRAEDTAVYYCDSYGYRGQGTLVTVSS

SEQ ID NO: 66 - protein, 111 aa, Artificial Sequence
  Description of Artificial Sequence: Synthetic polypeptide
EVQLVESGGGLVQPGGSLRLSCAASRFMISPYSMHWVRQAPGKGLEWVSTINPAGTTDYAESVKGRFTISRDNAKNTLYLQMNSLRAEDTAVYYCDGYGYRGQGTLVTVSS

SEQ ID NO: 67 - protein, 111 aa, Artificial Sequence
  Description of Artificial Sequence: Synthetic polypeptide
EVQLVESGGGLVQPGGSLRLSCAASRFMISEYSMHWVRQAPGKGLEWVSTINPAGQTDYAESVKGRFTISRDNAKNTLYLQMNSLRAEDTAVYYCDGYGYRGQGTLVTVSS

SEQ ID NO: 68 - protein, 111 aa, Artificial Sequence
  Description of Artificial Sequence: Synthetic polypeptide
EVQLVESGGGLVQPGGSLRLSCAASRFMISEYSMHWVRQAPGKGLEWVSTINPAGTTDYAEYVKGRFTISRDNAKNTLYLQMNSLRAEDTAVYYCDGYGYRGQGTLVTVSS

SEQ ID NO: 69 - protein, 111 aa, Artificial Sequence
  Description of Artificial Sequence: Synthetic polypeptide
EVQLVESGGGLVQPGGSLRLSCAASRFMISEYHMHWVRQAPGKGLEWVSDINPAKTTDYAESVKGRFTISRDNAKNTLYLQMNSLRAEDTAVYYCDSYGYRGQGTLVTVSS

SEQ ID NO: 70 - protein, 111 aa, Artificial Sequence
  Description of Artificial Sequence: Synthetic polypeptide
EVQLVESGGGLVQPGGSLRLSCAASRFMISPYHMHWVRQAPGKGLEWVSDINPAGTTDYAESVKGRFTISRDNAKNTLYLQMNSLRAEDTAVYYCDSYGYRGQGTLVTVSS

SEQ ID NO: 71 - protein, 111 aa, Artificial Sequence
  Description of Artificial Sequence: Synthetic polypeptide
EVQLVESGGGLVQPGGSLRLSCAASRFMISEYHMHWVRQAPGKGLEWVSDINPAGQTDYAESVKGRFTISRDNAKNTLYLQMNSLRAEDTAVYYCDSYGYRGQGTLVTVSS

SEQ ID NO: 72 - protein, 111 aa, Artificial Sequence
  Description of Artificial Sequence: Synthetic polypeptide
EVQLVESGGGLVQPGGSLRLSCAASRFMISEYHMHWVRQAPGKGLEWVSDINPAGTTDYAEYVKGRFTISRDNAKNTLYLQMNSLRAEDTAVYYCDSYGYRGQGTLVTVSS

SEQ ID NO: 73 - protein, 111 aa, Artificial Sequence
  Description of Artificial Sequence: Synthetic polypeptide
EVQLVESGGGLVQPGGSLTLSCAASRFMISEYHMHWVRQAPGKGLEWVSDINPAGTTDYAESVKGRFTISRDNAKNTLYLQMNSLKPEDTAVYYCDSYGYRGQGTQVTVSS

SEQ ID NO: 74 - protein, 249 aa, Artificial Sequence
  Description of Artificial Sequence: Synthetic polypeptide
EVQLVESGGGLVQPGGSLKLSCAASGFTFNKYAINWVRQAPGKGLEWVARIRSKYNNYATYYADQVKDRFTISRDDSKNTAYLQMNNLKTEDTAVYYCVRHANFGNSYISYWAYWGQGTLVTVSSGGGGSGGGGSGGGGSQTVVTQEPSLTVSPGGTVTLTCASSTGAVTSGNYPNWVQQKPGQAPRGLIGGTKFLVPGTPARFSGSLLGGKAALTLSGVQPEDEAEYYCTLWYSNRWVFGGGTKLTVL

SEQ ID NO: 75 - protein, 249 aa, Artificial Sequence
  Description of Artificial Sequence: Synthetic polypeptide
EVQLVESGGGLVQPGGSLKLSCAASGFEFNKYAMNWVRQAPGKGLEWVARIRSKYNKYATYYADSVKDRFTISRDDSKNTAYLQMNNLKTEDTAVYYCVRHGNFGNSYISYWAYWGQGTLVTVSSGGGGSGGGGSGGGGSQTVVTQEPSLTVSPGGTVTLTCGSSFGAVTSGNYPNWVQQKPGQAPRGLIGGTKFLAPGTPARFSGSLLGGKAALTLSGVQPEDEAEYYCVLWYDNRWVFGGGTKLTVL

SEQ ID NO: 76 - protein, 249 aa, Artificial Sequence
  Description of Artificial Sequence: Synthetic polypeptide
EVQLVESGGGLVQPGGSLKLSCAASGFTFNKYAMNWVRQAPGKGLEWVARIRSKYNNYATYYADSVKDRFTISRDDSKNTAYLQMNNLKTEDTAVYYCVRHGNFGNSHISYWAYWGQGTLVTVSSGGGGSGGGGSGGGGSQTVVTQEPSLTVSPGGTVTLTCGSSTGYVTSGNYPNWVQQKPGQAPRGLIGGTSFLAPGTPARFSGSLLGGKAALTLSGVQPEDEAEYYCVLWYSNRWIFGGGTKLTVL

SEQ ID NO: 77 - protein, 249 aa, Artificial Sequence
  Description of Artificial Sequence: Synthetic polypeptide
EVQLVESGGGLVQPGGSLKLSCAASGFMFNKYAMNWVRQAPGKGLEWVARIRSKSNNYATYYADSVKDRFTISRDDSKNTAYLQMNNLKTEDTAVYYCVRHGNFGNSYISYWATWGQGTLVTVSSGGGGSGGGGSGGGGSQTVVTQEPSLTVSPGGTVTLTCGSSFGAVTSGNYPNWVQQKPGQAPRGLIGGTKLLAPGTPARFSGSLLGGKAALTLSGVQPEDEAEYYCVLWYSNSWVFGGGTKLTVL

SEQ ID NO: 78 - protein, 249 aa, Artificial Sequence
  Description of Artificial Sequence: Synthetic polypeptide
EVQLVESGGGLVQPGGSLKLSCAASGFTFNTYAMNWVRQAPGKGLEWVARIRSKYNNYATYYKDSVKDRFTISRDDSKNTAYLQMNNLKTEDTAVYYCVRHGNFGNSPISYWAYWGQGTLVTVSSGGGGSGGGGSGGGGSQTVVTQEPSLTVSPGGTVTLTCGSSTGAVVSGNYPNWVQQKPGQAPRGLIGGTEFLAPGTPARFSGSLLGGKAALTLSGVQPEDEAEYYCVLWYSNRWVFGGGTKLTVL

SEQ ID NO: 79 - protein, 249 aa, Artificial Sequence
  Description of Artificial Sequence: Synthetic polypeptide
EVQLVESGGGLVQPGGSLKLSCAASGFTYNKYAMNWVRQAPGKGLEWVARIRSKYNNYATYYADEVKDRFTISRDDSKNTAYLQMNNLKTEDTAVYYCVRHGNFGNSPISYWAYWGQGTLVTVSSGGGGSGGGGSGGGGSQTVVTQEPSLTVSPGGTVTLTCGSSKGAVTSGNYPNWVQQKPGQAPRGLIGGTKELAPGTPARFSGSLLGGKAALTLSGVQPEDEAEYYCTLWYSNRWVFGGGTKLTVL

SEQ ID NO: 80 - protein, 249 aa, Artificial Sequence
  Description of Artificial Sequence: Synthetic polypeptide
EVQLVESGGGLVQPGGSLKLSCAASGNTFNKYAMNWVRQAPGKGLEWVARIRSKYNNYETYYADSVKDRFTISRDDSKNTAYLQMNNLKTEDTAVYYCVRHTNFGNSYISYWAYWGQGTLVTVSSGGGGSGGGGSGGGGSQTVVTQEPSLTVSPGGTVTLTCGSSTGAVTSGYYPNWVQQKPGQAPRGLIGGTYFLAPGTPARFSGSLLGGKAALTLSGVQPEDEAEYYCVLWYSNRWVFGGGTKLTVL

SEQ ID NO: 81 - protein, 249 aa, Artificial Sequence
  Description of Artificial Sequence: Synthetic polypeptide
EVQLVESGGGLVQPGGSLKLSCAASGFTFNNYAMNWVRQAPGKGLEWVARIRSKYNNYATYYADAVKDRFTISRDDSKNTAYLQMNNLKTEDTAVYYCVRHGNFGNSQISYWAYWGQGTLVTVSSGGGGSGGGGSGGGGSQTVVTQEPSLTVSPGGTVTLTCGSSTGAVTDGNYPNWVQQKPGQAPRGLIGGIKFLAPGTPARFSGSLLGGKAALTLSGVQPEDEAEYYCVLWYSNRWVFGGGTKLTVL

SEQ ID NO: 82 - protein, 249 aa, Artificial Sequence
  Description of Artificial Sequence: Synthetic polypeptide
EVQLVESGGGLVQPGGSLKLSCAASGFTFNKYAVNWVRQAPGKGLEWVARIRSKYNNYATYYADSVKDRFTISRDDSKNTAYLQMNNLKTEDTAVYYCVRHGNFGNSYISYWAYWGQGTLVTVSSGGGGSGGGGSGGGGSQTVVTQEPSLTVSPGGTVTLTCGESTGAVTSGNYPNWVQQKPGQAPRGLIGGTKILAPGTPARFSGSLLGGKAALTLSGVQPEDEAEYYCVLWYSNRWVFGGGTKLTVL

SEQ ID NO: 83 - protein, 249 aa, Artificial Sequence
  Description of Artificial Sequence: Synthetic polypeptide
EVQLVESGGGLVQPGGSLKLSCAASGFTFNKYPMNWVRQAPGKGLEWVARIRSKYNNYATYYADSVKDRFTISRDDSKNTAYLQMNNLKNEDTAVYYCVRHGNFNNSYISYWAYWGQGTLVTVSSGGGGSGGGGSGGGGSQTVVTQEPSLTVSPGGTVTLTCGSSTGAVTKGNYPNWVQQKPGQAPRGLIGGTKMLAPGTPARFSGSLLGGKAALTLSGVQPEDEAEYYCALWYSNRWVFGGGTKLTVL

SEQ ID NO: 84 - protein, 249 aa, Artificial Sequence
  Description of Artificial Sequence: Synthetic polypeptide
EVQLVESGGGLVQPGGSLKLSCAASGFTFNGYAMNWVRQAPGKGLEWVARIRSKYNNYATYYADEVKDRFTISRDDSKNTAYLQMNNLKTEDTAVYYCVRHGNFGNSPISYWAYWGQGTLVTVSSGGGGSGGGGSGGGGSQTVVTQEPSLTVSPGGTVTLTCGSSTGAVVSGNYPNWVQQKPGQAPRGLIGGTEFLAPGTPARFSGSLLGGKAALTLSGVQPEDEAEYYCVLWYSNRWVFGGGTKLTVL

SEQ ID NO: 85 - protein, 249 aa, Artificial Sequence
  Description of Artificial Sequence: Synthetic polypeptide
EVQLVESGGGLVQPGGSLKLSCAASGNTFNKYAMNWVRQAPGKGLEWVARIRSKYNNYATYYADSVKDRFTISRDDSKNTAYLQMNNLKTEDTAVYYCVRHGNFGDSYISYWAYWGQGTLVTVSSGGGGSGGGGSGGGGSQTVVTQEPSLTVSPGGTVTLTCGSSTGAVTHGNYPNWVQQKPGQAPRGLIGGTKVLAPGTPARFSGSLLGGKAALTLSGVQPEDEAEYYCVLWYSNRWVFGGGTKLTVL

SEQ ID NO: 86 - protein, 249 aa, Artificial Sequence
  Description of Artificial Sequence: Synthetic polypeptide
EVQLVESGGGLVQPGGSLKLSCAASGFTFNNYAMNWVRQAPGKGLEWVARIRSGYNNYATYYADSVKDRFTISRDDSKNTAYLQMNNLKTEDTAVYYCVRHGNFGNSYISYWAYWGQGTLVTVSSGGGGSGGGGSGGGGSQTVVTQEPSLTVSPGGTVTLTCGSYTGAVTSGNYPNWVQQKPGQAPRGLIGGTKFNAPGTPARFSGSLLGGKAALTLSGVQPEDEAEYYCVLWYANRWVFGGGTKLTVL

SEQ ID NO: 87 - protein, 249 aa, Artificial Sequence
  Description of Artificial Sequence: Synthetic polypeptide
EVQLVESGGGLVQPGGSLKLSCAASGFEFNKYAMNWVRQAPGKGLEWVARIRSKYNNYETYYADSVKDRFTISRDDSKNTAYLQMNNLKTEDTAVYYCVRHGNFGNSLISYWAYWGQGTLVTVSSGGGGSGGGGSGGGGSQTVVTQEPSLTVSPGGTVTLTCGSSSGAVTSGNYPNWVQQKPGQAPRGLIGGTKFGAPGTPARFSGSLLGGKAALTLSGVQPEDEAEYYCVLWYSNRWVFGGGTKLTVL

SEQ ID NO: 88 - protein, 249 aa, Artificial Sequence
  Description of Artificial Sequence: Synthetic polypeptide
EVQLVESGGGLVQPGGSLKLSCAASGFTFNKYAMNWVRQAPGKGLEWVARIRSKYNNYATYYADSVKDRFTISRDDSKNTAYLQMNNLKTEDTAVYYCVRHGNFGNSYISYWAYWGQGTLVTVSSGGGGSGGGGSGGGGSQTVVTQEPSLTVSPGGTVTLTCGSSTGAVTSGNYPNWVQQKPGQAPRGLIGGTKFLAPGTPARFSGSLLGGKAALTLSGVQPEDEAEYYCVLWYSNRWVFGGGTKLTVL

SEQ ID NO: 89 - protein, 249 aa, Artificial Sequence
  Description of Artificial Sequence: Synthetic polypeptide
EVQLVESGGGLVQPGGSLKLSCAASGFTFNKYALNWVRQAPGKGLEWVARIRSKYNNYATEYADSVKDRFTISRDDSKNTAYLQMNNLKTEDTAVYYCVRHGNFGNSPISYWAYWGQGTLVTVSSGGGGSGGGGSGGGGSQTVVTQEPSLTVSPGGTVTLTCGSSTGAVTSGNYPNWVQQKPGQAPRGLIGGTNFLAPGTPERFSGSLLGGKAALTLSGVQPEDEAEYYCVLWYSNRWAFGGGTKLTVL

SEQ ID NO: 90 - protein, 249 aa, Artificial Sequence
  Description of Artificial Sequence: Synthetic polypeptide
EVQLVESGGGLVQPGGSLKLSCAASGFTFNEYAMNWVRQAPGKGLEWVARIRSKYNNYATYYADDVKDRFTISRDDSKNTAYLQMNNLKTEDTAVYYCVRHGNFGNSGISYWAYWGQGTLVTVSSGGGGSGGGGSGGGGSQTVVTQEPSLTVSPGGTVTLTCGSSTGAVTVGNYPNWVQQKPGQAPRGLIGGTEFLAPGTPARFSGSLLGGKAALTLSGVQPEDEAEYYCVLWYSNRWVFGGGTKLTVL

SEQ ID NO: 91 - protein, 119 aa, Artificial Sequence
  Description of Artificial Sequence: Synthetic polypeptide
EVQLVESGGGLVQPGRSLTLSCAASTNIFSISPMGWYRQAPGKQRELVAAIHGFSTLYADSVKGRFTISRDNAKNSIYLQMNSLRPEDTALYYCNKVPWGDYHPRNVYWGQGTQVTVSS

SEQ ID NO: 92 - protein, 119 aa, Artificial Sequence
  Description of Artificial Sequence: Synthetic polypeptide
EVQLVESGGGLVQPGRSLTLSCAASTDIFSISPMGWYRQAPGKQRELVAAIHGGSTLYADSVKGRFTISRDNAKNSIYLQMNSLRPEDTALYYCNKVPWGDYHPRNVAWGQGTQVTVSS

SEQ ID NO: 93 - protein, 119 aa, Artificial Sequence
  Description of Artificial Sequence: Synthetic polypeptide
EVQLVESGGGLVQPGRSLTLSCAASTNDFSISPMGWYRQAPGKQRELVAAIHGGSTLYADSVKGRFTISRDNAKNSIYLQMNSLRPEDTALYYCNKVPWGDYHPRNVAWGQGTQVTVSS

SEQ ID NO: 94 - protein, 119 aa, Artificial Sequence
  Description of Artificial Sequence: Synthetic polypeptide
EVQLVESGGGLVQPGRSLTLSCAASTNIFSKSPMGWYRQAPGKQRELVAAIHGKSTLYADSVKGRFTISRDNAKNSIYLQMNSLRPEDTALYYCNKVPWGDYHPRNVVWGQGTQVTVSS

SEQ ID NO: 95 - protein, 119 aa, Artificial Sequence
  Description of Artificial Sequence: Synthetic polypeptide
EVQLVESGGGLVQPGRSLTLSCAASTNDFSISPMGWYRQAPGKQRELVAAIHGKSTLYADSVKGRFTISRDNAKNSIYLQMNSLRPEDTALYYCNKVPWGDYHPRNVKWGQGTQVTVSS

SEQ ID NO: 96 - protein, 119 aa, Artificial Sequence
  Description of Artificial Sequence: Synthetic polypeptide
EVQLVESGGGLVQPGRSLTLSCAASTNQFSISPMGWYRQAPGKQRELVAAIHGKSTLYADSVKGRFTISRDNAKNSIYLQMNSLRPEDTALYYCNKVPWGDYHPRNVVWGQGTQVTVSS

SEQ ID NO: 97 - protein, 119 aa, Artificial Sequence
  Description of Artificial Sequence: Synthetic polypeptide
EVQLVESGGGLVQPGRSLTLSCAASTNIFSSSPMGWYRQAPGKQRELVAAINGFSTLYADSVKGRFTISRDNAKNSIYLQMNSLRPEDTALYYCNKVPWGDYHPRNVHWGQGTQVTVSS

SEQ ID NO: 98 - protein, 119 aa, Artificial Sequence
  Description of Artificial Sequence: Synthetic polypeptide
EVQLVESGGGLVQPGRSLTLSCAASTNIFSSSPMGWYRQAPGKQRELVAAIHGFSTLYADSVKGRFTISRDNAKNSIYLQMNSLRPEDTALYYCNKVPWGDYHPRNVYWGQGTQVTVSS

SEQ ID NO: 99 - protein, 119 aa, Artificial Sequence
  Description of Artificial Sequence: Synthetic polypeptide
EVQLVESGGGLVQPGRSLTLSCAASTNIFSTSPMGWYRQAPGKQRELVAAIHGFQTLYADSVKGRFTISRDNAKNSIYLQMNSLRPEDTALYYCNKVPWGDYHPRNVVWGQGTQVTVSS

SEQ ID NO: 100 - protein, 119 aa, Artificial Sequence
  Description of Artificial Sequence: Synthetic polypeptide
EVQLVESGGGLVQPGRSLTLSCAASTNIFSRSPMGWYRQAPGKQRELVAAIHGFETLYADSVKGRFTISRDNAKNSIYLQMNSLRPEDTALYYCNKVPWGDYHPRNVLWGQGTQVTVSS

SEQ ID NO: 101 - protein, 119 aa, Artificial Sequence
  Description of Artificial Sequence: Synthetic polypeptide
EVQLVESGGGLVQPGRSLTLSCAASTNIFSESPMGWYRQAPGKQRELVAAIHGFTTLYADSVKGRFTISRDNAKNSIYLQMNSLRPEDTALYYCNKVPWGDYHPRNVTWGQGTQVTVSS

SEQ ID NO: 102 - protein, 119 aa, Artificial Sequence
  Description of Artificial Sequence: Synthetic polypeptide
EVQLVESGGGLVQPGRSLTLSCAASTNIFSDSPMGWYRQAPGKQRELVAAIHGFSTLYADSVKGRFTISRDNAKNSIYLQMNSLRPEDTALYYCNKVPWGDYHPRNVAWGQGTQVTVSS

SEQ ID NO: 103 - protein, 119 aa, Artificial Sequence
  Description of Artificial Sequence: Synthetic polypeptide
EVQLVESGGGLVQPGRSLTLSCAASTNIFSNSPMGWYRQAPGKQRELVAAIHGGSTLYADSVKGRFTISRDNAKNSIYLQMNSLRPEDTALYYCNKVPWGDYHPRNVHWGQGTQVTVSS

SEQ ID NO: 104 - protein, 119 aa, Artificial Sequence
  Description of Artificial Sequence: Synthetic polypeptide
EVQLVESGGGLVQPGRSLTLSCAASTNIFSNSPMGWYRQAPGKQRELVAAIHGRSTLYADSVKGRFTISRDNAKNSIYLQMNSLRPEDTALYYCNKVPWGDYHPRNVMWGQGTQVTVSS

SEQ ID NO: 105 - protein, 119 aa, Artificial Sequence
  Description of Artificial Sequence: Synthetic polypeptide
EVQLVESGGGLVQPGRSLTLSCAASTNIFSNSPMGWYRQAPGKQRELVAAIHGPSTLYADSVKGRFTISRDNAKNSIYLQMNSLRPEDTALYYCNKVPWGDYHPRNVTWGQGTQVTVSS

SEQ ID NO: 106 - protein, 119 aa, Artificial Sequence
  Description of Artificial Sequence: Synthetic polypeptide
EVQLVESGGGLVQPGRSLTLSCAASTNIFSNSPMGWYRQAPGKQRELVAAIHGDSTLYADSVKGRFTISRDNAKNSIYLQMNSLRPEDTALYYCNKVPWGDYHPRNVRWGQGTQVTVSS

SEQ ID NO: 107 - protein, 119 aa, Artificial Sequence
  Description of Artificial Sequence: Synthetic polypeptide
EVQLVESGGGLVQPGRSLTLSCAASTNIFSRSPMGWYRQAPGKQRELVAAIHGDSTLYADSVKGRFTISRDNAKNSIYLQMNSLRPEDTALYYCNKVPWGDYHPRNVTWGQGTQVTVSS

SEQ ID NO: 108 - protein, 119 aa, Artificial Sequence
  Description of Artificial Sequence: Synthetic polypeptide
EVQLVESGGGLVQPGRSLTLSCAASTNIFSKSPMGWYRQAPGKQRELVAAIHGQSTLYADSVKGRFTISRDNAKNSIYLQMNSLRPEDTALYYCNKVPWGDYHPRNVTWGQGTQVTVSS

SEQ ID NO: 109 - protein, 119 aa, Artificial Sequence
  Description of Artificial Sequence: Synthetic polypeptide
EVQLVESGGGLVQPGRSLTLSCAASTNIFSSSPMGWYRQAPGKQRELVAAIHGHSTLYADSVKGRFTISRDNAKNSIYLQMNSLRPEDTALYYCNKVPWGDYHPRNVTWGQGTQVTVSS

SEQ ID NO: 110 - protein, 119 aa, Artificial Sequence
  Description of Artificial Sequence: Synthetic polypeptide
EVQLVESGGGLVQPGRSLTLSCAASTNIFSSSPMGWYRQAPGKQRELVAAIHGESTLYADSVKGRFTISRDNAKNSIYLQMNSLRPEDTALYYCNKVPWGDYHPRKVYWGQGTQVTVSS

SEQ ID NO: 111 - protein, 119 aa, Artificial Sequence
  Description of Artificial Sequence: Synthetic polypeptide
EVQLVESGGGLVQPGRSLTLSCAASTNIFSRSPMGWYRQAPGKQRELVAAIHGNSTLYADSVKGRFTISRDNAKNSIYLQMNSLRPEDTALYYCNKVPWGIYHPRNVYWGQGTQVTVSS

SEQ ID NO: 112 - protein, 119 aa, Artificial Sequence
  Description of Artificial Sequence: Synthetic polypeptide
EVQLVESGGGLVQPGRSLTLSCAASTNIFSESPMGWYRQAPGKQRELVAAIHGNSTLYADSVKGRFTISRDNAKNSIYLQMNSLRPEDTALYYCNKVPWGTYHPRNVYWGQGTQVTVSS

SEQ ID NO: 113 - protein, 119 aa, Artificial Sequence
  Description of Artificial Sequence: Synthetic polypeptide
EVQLVESGGGLVQPGRSLTLSCAASTNIFSVSPMGWYRQAPGKQRELVAAIHGNSTLYADSVKGRFTISRDNAKNSIYLQMNSLRPEDTALYYCNKVPWGKYHPRNVYWGQGTQVTVSS

SEQ ID NO: 114 - protein, 119 aa, Artificial Sequence
  Description of Artificial Sequence: Synthetic polypeptide
EVQLVESGGGLVQPGRSLTLSCAASTNIFSVSPMGWYRQAPGKQRELVAAIHGNSTLYADSVKGRFTISRDNAKNSIYLQMNSLRPEDTALYYCNKVPWGDYHPRNVYWGQGTQVTVSS

SEQ ID NO: 115 - protein, 119 aa, Artificial Sequence
  Description of Artificial Sequence: Synthetic polypeptide
EVQLVESGGGLVQPGRSLTLSCAASTNIFSKSPMGWYRQAPGKQRELVAAIHGNSTLYADSVKGRFTISRDNAKNSIYLQMNSLRPEDTALYYCNKVPWGDYHPREVYWGQGTQVTVSS

SEQ ID NO: 116 - protein, 119 aa, Artificial Sequence
  Description of Artificial Sequence: Synthetic polypeptide
EVQLVESGGGLVQPGRSLTLSCAASTNIFSDSPMGWYRQAPGKQRELVAAIHGTSTLYADSVKGRFTISRDNAKNSIYLQMNSLRPEDTALYYCNKVPWGDYHPRNVYWGQGTQVTVSS

SEQ ID NO: 117 - protein, 119 aa, Artificial Sequence
  Description of Artificial Sequence: Synthetic polypeptide
EVQLVESGGGLVQPGRSLTLSCAASTNIFSRSPMGWYRQAPGKQRELVAAIHGTSTLYADSVKGRFTISRDNAKNSIYLQMNSLRPEDTALYYCNKVPWGKYHPRNVYWGQGTQVTVSS

SEQ ID NO: 118 - protein, 119 aa, Artificial Sequence
  Description of Artificial Sequence: Synthetic polypeptide
EVQLVESGGGLVQPGRSLTLSCAASTNIFSHSPMGWYRQAPGKQRELVAAIHGTSTLYADSVKGRFTISRDNAKNSIYLQMNSLRPEDTALYYCNKVPWGRYHPRNVYWGQGTQVTVSS

SEQ ID NO: 119 - protein, 119 aa, Artificial Sequence
  Description of Artificial Sequence: Synthetic polypeptide
EVQLVESGGGLVQPGRSLTLSCAASTNIFSTSPMGWYRQAPGKQRELVAAIHGTSTLYADSVKGRFTISRDNAKNSIYLQMNSLRPEDTALYYCNKVPWGDYHPGNVYWGQGTQVTVSS

SEQ ID NO: 120 - protein, 119 aa, Artificial Sequence
  Description of Artificial Sequence: Synthetic polypeptide
EVQLVESGGGLVQPGRSLTLSCAASTNIFSTSPMGWYRQAPGKQRELVAAIHGTSTLYADSVKGRFTISRDNAKNSIYLQMNSLRPEDTALYYCNKVPWGDYHPRNVQWGQGTQVTVSS

SEQ ID NO: 121 - protein, 119 aa, Artificial Sequence
  Description of Artificial Sequence: Synthetic polypeptide
EVQLVESGGGLVQPGRSLTLSCAASTNIFSLSPMGWYRQAPGKQRELVAAIHGDSTLYADSVKGRFTISRDNAKNSIYLQMNSLRPEDTALYYCNKVPWGDYHPRNVYWGQGTQVTVSS

SEQ ID NO: 122 - protein, 119 aa, Artificial Sequence
  Description of Artificial Sequence: Synthetic polypeptide
EVQLVESGGGLVQPGRSLTLSCAASTNIFSISPGGWYRQAPGKQRELVAAIHGSSTLYADSVKGRFTISRDNAKNSIYLQMNSLRPEDTALYYCNKVPWGDYHPRNVYWGQGTQVTVSS

SEQ ID NO: 123 - protein, 119 aa, Artificial Sequence
  Description of Artificial Sequence: Synthetic polypeptide
EVQLVESGGGLVQPGRSLTLSCAASTNHFSISPMGWYRQAPGKQRELVAAIHGSSTLYADSVKGRFTISRDNAKNSIYLQMNSLRPEDTALYYCNKVPWGDYHPRVVYWGQGTQVTVSS

SEQ ID NO: 124 - protein, 119 aa, Artificial Sequence
  Description of Artificial Sequence: Synthetic polypeptide
EVQLVESGGGLVQPGRSLTLSCAASTNIFSASPMGWYRQAPGKQRELVAAIHGSSTLYADSVKGRFTISRDNAKNSIYLQMNSLRPEDTALYYCNKVPWGDYHPRNVNWGQGTQVTVSS

SEQ ID NO: 125 - protein, 119 aa, Artificial Sequence
  Description of Artificial Sequence: Synthetic polypeptide
EVQLVESGGGLVQPGRSLTLSCAASTNIFSASPMGWYRQAPGKQRELVAAIHGSSTLYADSVKGRFTISRDNAKNSIYLQMNSLRPEDTALYYCNKVPWGRYHPRNVYWGQGTQVTVSS

SEQ ID NO: 126 - protein, 119 aa, Artificial Sequence
  Description of Artificial Sequence: Synthetic polypeptide
EVQLVESGGGLVQPGRSLTLSCAASTNISSISPMGWYRQAPGKQRELVAAIHGTSTLYADSVKGRFTISRDNAKNSIYLQMNSLRPEDTALYYCNKVPWGDYHPGNVYWGQGTQVTVSS

SEQ ID NO: 127 - protein, 119 aa, Artificial Sequence
  Description of Artificial Sequence: Synthetic polypeptide
EVQLVESGGGLVQPGRSLTLSCAASTNIESISPMGWYRQAPGKQRELVAAIHGTSTLYADSVKGRFTISRDNAKNSIYLQMNSLRPEDTALYYCNKVPWGDYHPGNVYWGQGTQVTVSS

SEQ ID NO: 128 - protein, 119 aa, Artificial Sequence
  Description of Artificial Sequence: Synthetic polypeptide
EVQLVESGGGLVQPGRSLTLSCAASTNIFSISPYGWYRQAPGKQRELVAAIHGTSTLYADSVKGRFTISRDNAKNSIYLQMNSLRPEDTALYYCNKVPWGDYHPGNVYWGQGTQVTVSS

SEQ ID NO: 129 - protein, 119 aa, Artificial Sequence
  Description of Artificial Sequence: Synthetic polypeptide
EVQLVESGGGLVQPGRSLTLSCAASTNIASISPMGWYRQAPGKQRELVAAIHGTSTLYADSVKGRFTISRDNAKNSIYLQMNSLRPEDTALYYCNKVPWGDYHPGNVYWGQGTQVTVSS

SEQ ID NO: 130 - protein, 119 aa, Artificial Sequence
  Description of Artificial Sequence: Synthetic polypeptide
EVQLVESGGGLVQPGRSLTLSCAASTNIASISPMGWYRQAPGKQRELVAAIHGKSTLYADSVKGRFTISRDNAKNSIYLQMNSLRPEDTALYYCNKVPWGDYHPGNVYWGQGTQVTVSS

SEQ ID NO: 131 - protein, 119 aa, Artificial Sequence
  Description of Artificial Sequence: Synthetic polypeptide
EVQLVESGGGLVQPGRSLTLSCAASTNIASISPMGWYRQAPGKQRELVAAIHGSSTLYADSVKGRFTISRDNAKNSIYLQMNSLRPEDTALYYCNKVPWGDYHPGNVYWGQGTQVTVSS

SEQ ID NO: 132 - protein, 119 aa, Artificial Sequence
  Description of Artificial Sequence: Synthetic polypeptide
EVQLVESGGGLVQPGRSLTLSCAASTNITSISPMGWYRQAPGKQRELVAAIHGDSTLYADSVKGRFTISRDNAKNSIYLQMNSLRPEDTALYYCNKVPWGDYHPGNVYWGQGTQVTVSS

SEQ ID NO: 133 - protein, 119 aa, Artificial Sequence
  Description of Artificial Sequence: Synthetic polypeptide
EVQLVESGGGLVQPGRSLTLSCAASTNIMSISPMGWYRQAPGKQRELVAAIHGNSTLYADSVKGRFTISRDNAKNSIYLQMNSLRPEDTALYYCNKVPWGDYHPGNVYWGQGTQVTVSS

SEQ ID NO: 134 - protein, 119 aa, Artificial Sequence
  Description of Artificial Sequence: Synthetic polypeptide
EVQLVESGGGLVQPGRSLTLSCAASTNITSISPMGWYRQAPGKQRELVAAIHGNSTLYADSVKGRFTISRDNAKNSIYLQMNSLRPEDTALYYCNKVPWGDYHPGNVYWGQGTQVTVSS

SEQ ID NO: 135 - protein, 119 aa, Artificial Sequence
  Description of Artificial Sequence: Synthetic polypeptide
EVQLVESGGGLVQPGRSLTLSCAASTNIVSISPMGWYRQAPGKQRELVAAIHGHSTLYADSVKGRFTISRDNAKNSIYLQMNSLRPEDTALYYCNKVPWGDYHPGNVYWGQGTQVTVSS

SEQ ID NO: 136 - protein, 119 aa, Artificial Sequence
  Description of Artificial Sequence: Synthetic polypeptide
EVQLVESGGGLVQPGRSLTLSCAASTNIVSISPMGWYRQAPGKQRELVAAIHGKSTLYADSVKGRFTISRDNAKNSIYLQMNSLRPEDTALYYCNKVPWGDYHPGNVYWGQGTQVTVSS

SEQ ID NO: 137 - protein, 119 aa, Artificial Sequence
  Description of Artificial Sequence: Synthetic polypeptide
EVQLVESGGGLVQPGRSLTLSCAASTNVVSISPMGWYRQAPGKQRELVAAIHGKSTLYADSVKGRFTISRDNAKNSIYLQMNSLRPEDTALYYCNKVPWGDYHPNNVYWGQGTQVTVSS

SEQ ID NO: 138 - protein, 119 aa, Artificial Sequence
  Description of Artificial Sequence: Synthetic polypeptide
EVQLVESGGGLVQPGRSLTLSCAASTNIISISPMGWYRQAPGKQRELVAAIHGASTLYADSVKGRFTISRDNAKNSIYLQMNSLRPEDTALYYCNKVPWGDYHPGNVYWGQGTQVTVSS

SEQ ID NO: 139 - protein, 119 aa, Artificial Sequence
  Description of Artificial Sequence: Synthetic polypeptide
EVQLVESGGGLVQPGRSLTLSCAASTNIFSITPMGWYRQAPGKQRELVAAIHGASTLYADSVKGRFTISRDNAKNSIYLQMNSLRPEDTALYYCNKVPWGDYHPGNVYWGQGTQVTVSS

SEQ ID NO: 140 - protein, 119 aa, Artificial Sequence
  Description of Artificial Sequence: Synthetic polypeptide
EVQLVESGGGLVQPGRSLTLSCAASTNITSISPMGWYRQAPGKQRELVAAIHGFETLYADSVKGRFTISRDNAKNSIYLQMNSLRPEDTALYYCNKVPWGDYHPGNVYWGQGTQVTVSS

SEQ ID NO: 141 - protein, 119 aa, Artificial Sequence
  Description of Artificial Sequence: Synthetic polypeptide
EVQLVESGGGLVQPGRSLTLSCAASTNIQSISPMGWYRQAPGKQRELVAAIHGFETLYADSVKGRFTISRDNAKNSIYLQMNSLRPEDTALYYCNKVPWGDYHPGNVYWGQGTQVTVSS

SEQ ID NO: 142 - protein, 119 aa, Artificial Sequence
  Description of Artificial Sequence: Synthetic polypeptide
EVQLVESGGGLVQPGRSLTLSCAASTSDFSISPMGWYRQAPGKQRELVAAIHGFETLYADSVKGRFTISRDNAKNSIYLQMNSLRPEDTALYYCNKVPWGDYHPGNVYWGQGTQVTVSS

SEQ ID NO: 143 - protein, 119 aa, Artificial Sequence
  Description of Artificial Sequence: Synthetic polypeptide
EVQLVESGGGLVQPGRSLTLSCAASTNIDSISPMGWYRQAPGKQRELVAAIHGFQTLYADSVKGRFTISRDNAKNSIYLQMNSLRPEDTALYYCNKVPWGDYHPGNVYWGQGTQVTVSS

SEQ ID NO: 144 - protein, 119 aa, Artificial Sequence
  Description of Artificial Sequence: Synthetic polypeptide
EVQLVESGGGLVQPGRSLTLSCAASTNIMSISPMGWYRQAPGKQRELVAAIHGFSTVYADSVKGRFTISRDNAKNSIYLQMNSLRPEDTALYYCNKVPWGDYHPGNVYWGQGTQVTVSS

SEQ ID NO: 145 - protein, 119 aa, Artificial Sequence
  Description of Artificial Sequence: Synthetic polypeptide
EVQLVESGGGLVQPGRSLTLSCAASTNIESISPMGWYRQAPGKQRELVAAIHGFSTLYADSVKGRFTISRDNAKNSIYLQMNSLRPEDTALYYCNKVPWGDYHPGNVYWGQGTQVTVSS

SEQ ID NO: 146 - protein, 119 aa, Artificial Sequence
  Description of Artificial Sequence: Synthetic polypeptide
EVQLVESGGGLVQPGRSLTLSCAASTNIFSSSPMGWYRQAPGKQRELVAAIHGFKTLYADSVKGRFTISRDNAKNSIYLQMNSLRPEDTARYYCNKVPWGDYHPGNVYWGQGTQVTVSS

SEQ ID NO: 147 - protein, 119 aa, Artificial Sequence
  Description of Artificial Sequence: Synthetic polypeptide
EVQLVESGGGLVQPGRSLTLSCAASTNIFSSSPMGWYRQAPGKQRELVAAIHGFSTLYADSVKGRFTISRDNAKNSIYLQMNSLRPEDTALYYCNKVPWGDYHPGNVYWGQGTQVTVSS

SEQ ID NO: 148 - protein, 119 aa, Artificial Sequence
  Description of Artificial Sequence: Synthetic polypeptide
EVQLVESGGGLVQPGRSLTLSCAASTNIFSNSPMGWYRQAPGKQRELVAAIHGFSTLYADSVKGRFTISRDNAKNSIYLQMNSLRPEDTALYYCNKVPWGDYHPGNVYWGQGTQVTVSS

SEQ ID NO: 149 - protein, 119 aa, Artificial Sequence
  Description of Artificial Sequence: Synthetic polypeptide
EVQLVESGGGLVQPGRSLTLSCAASTNIFSTSPMGWYRQAPGKQRELVAAIHGFSTIYADSVKGRFTISRDNAKNSIYLQMNSLRPEDTALYYCNKVPWGDYHPGNVYWGQGTQVTVSS

SEQ ID NO: 150 - protein, 119 aa, Artificial Sequence
  Description of Artificial Sequence: Synthetic polypeptide
EVQLVESGGGLVQPGRSLTLSCAASTNIFSTSPMGWYRQAPGKQRELVAAIHGFSTIYADSVKGRFTISRDNAKNSIYLQMNSLRPEDTALYYCNKVPWGDYHPLNVYWGQGTQVTVSS

SEQ ID NO: 151 - protein, 119 aa, Artificial Sequence
  Description of Artificial Sequence: Synthetic polypeptide
EVQLVESGGGLVQPGRSLTLSCVASTNIFSTSPMGWYRQAPGKQRELVAAIHGFSTLYADSVKGRFTISRDNAKNSIYLQMNSLRPEDTALYYCNKVPWGDYHPGNVYWGQGTQVTVSS

SEQ ID NO: 152 - protein, 119 aa, Artificial Sequence
  Description of Artificial Sequence: Synthetic polypeptide
EVQLVESGGGLVQPGRSLTLSCAASTNIFSDSPMGWYRQAPGKQRELVAAIHGFSTFYADSVKGRFTISRDNAKNSIYLQMNSLRPEDTALYYCNKVPWGDYHPGNVYWGQGTQVTVSS

SEQ ID NO: 153 - protein, 119 aa, Artificial Sequence
  Description of Artificial Sequence: Synthetic polypeptide
EVQLVESGGGLVQPGRSLTLSCAASTNIFSQSPMGWYRQAPGKQRELVAAIHGDSTLYADSVKGRFTISRDNAKNSIYLQMNSLRPEDTALYYCNKVPWGDYHPGNVCWGQGTQVTVSS

SEQ ID NO: 154 - protein, 119 aa, Artificial Sequence
  Description of Artificial Sequence: Synthetic polypeptide
EVQLVESGGGLVQPGRSLTLSCAASTNIFSQSPMGWYRQAPGKQRELVAAIHGKSTLYADSVKGRFTISRDNAKNSIYLQMNSLRPEDTALYYCNKVPWGDYHPSNVYWGKGTQVTVSS

SEQ ID NO: 155 - protein, 119 aa, Artificial Sequence
  Description of Artificial Sequence: Synthetic polypeptide
EVQLVESGGGLVQPGRSLTLSCAASTNIFSRSPMGWYRQAPGKQRELVAAIHGESTLYADSVKGRFTISRDNAKNSIYLQMNSLRPEDTALYYCNKVPWGRYHPGNVYWGQGTQVTVSS

SEQ ID NO: 156 - protein, 119 aa, Artificial Sequence
  Description of Artificial Sequence: Synthetic polypeptide
EVQLVESGGGLVQPGRSLTLSCAASTNIFSRSPMGWYRQAPGKQRELVAAIHGISTLYADSVKGRFTISRDNAKNSIYLQMNSLRPEDTALYYCNKVPWGDYHPGNVYWGQGTQVTVSS

SEQ ID NO: 157 - protein, 119 aa, Artificial Sequence
  Description of Artificial Sequence: Synthetic polypeptide
EVQLVESGGGLVQPGRSLTLSCAASTNIFSRSPMGWYRQAPGKQRELVAAIHGSSTLYADSVKGRFTISRDNAKNSIYLQMNSLRPEDTALYYCNKVPWGDYHPGNVYWGQGTQVTVSS

SEQ ID NO: 158 - protein, 119 aa, Artificial Sequence
  Description of Artificial Sequence: Synthetic polypeptide
EVQLVESGGGLVQPGRSLTLSCAASTNIFSGSPMGWYRQAPGKQRELVAAIHGNSTLYADSVKGRFTISRDNAKNSIYLQMNSLRPEDTALYYCNKVPWGDYHPGNVYWGQGTQVTVSS

SEQ ID NO: 159 - protein, 119 aa, Artificial Sequence
  Description of Artificial Sequence: Synthetic polypeptide
EVQLVESGGGLVQPGRSLTLSCAASSNIFSISPMGWYRQAPGKQRELVAAIHGSSTLYADSVKGRFTISRDNAKNSIYLQMNSLRPEDTALYYCNKVPWGDYHPGNVYWGQGTQVTVSS

SEQ ID NO: 160 - protein, 119 aa, Artificial Sequence
  Description of Artificial Sequence: Synthetic polypeptide
EVQLVESGGGLVQPGRSLTLSCAASTNIFSIYPMGWYRQAPGKQRELVAAIHGSSTLYADSVKGRFTISRDNAKNSIYLQMNSLRPEDTALYYCNKVPWGDYHPKNVYWGQGTQVTVSS

SEQ ID NO: 161 - protein, 119 aa, Artificial Sequence
  Description of Artificial Sequence: Synthetic polypeptide
EVQLVESGGGLVQPGRSLTLSCAASTNIFSKSPMGWYRQAPGKQRELVAAIHGSSTLYADSVKGRFTISRDNAKNSIYLQMNSLRPEDTALYYCNKVPWGDYHPGNVYWGQGTQVTVSS

SEQ ID NO: 162 - protein, 119 aa, Artificial Sequence
  Description of Artificial Sequence: Synthetic polypeptide
EVQLVESGGGLVQPGRSLTLSCAASTNIFSKSPMGWYRQAPGKQRELVAAIHGSSTLYADSVKGRFTISRDNAKNSIYLQMNSLRPEDTALYYCNKVPWGDYHPRNVYWGQGTQVTVSS

SEQ ID NO: 163 - protein, 119 aa, Artificial Sequence
  Description of Artificial Sequence: Synthetic polypeptide
EVQLVESGGGLVQPGRSLTLSCAASTNEFSISPMGWYRQAPGKQRELVAAIHGLSTLYADSVKGRFTISRDNAKNSIYLQMNSLRPEDTALYYCNKVPWGAYHPRNVYWGQGTQVTVSS

SEQ ID NO: 164 - protein, 119 aa, Artificial Sequence
  Description of Artificial Sequence: Synthetic polypeptide
EVQLVESGGGLVQPGRSLTLSCAASTNEFSISPMGWYRQAPGKQRELVAAIHGESTLYADSVKGRFTISRDNAKNSIYLQMNSLRPEDTALYYCNKVPWGDYHPGNVYWGQGTQVTVSS

SEQ ID NO: 165 - protein, 119 aa, Artificial Sequence
  Description of Artificial Sequence: Synthetic polypeptide
EVQLVESGGGLVQPGRSLTLSCAASTNIPSISPMGWYRQAPGKQRELVAAIHGESTLYADSVKGRFTISRDNAKNSIYLQMNSLRPEDTALYYCNKVPWGDYHPRNVAWGQGTQVTVSS

SEQ ID NO: 166 - protein, 119 aa, Artificial Sequence
  Description of Artificial Sequence: Synthetic polypeptide
EVQLVESGGGLVQPGRSLTLSCAASTNIPSISPMGWYRQAPGKQRELVAAIHGASTLYADSVKGRFTISRDNAKNSIYLQMNSLRPEDTALYYCNKVPWGDYHPRNVAWGQGTQVTVSS

SEQ ID NO: 167 - protein, 119 aa, Artificial Sequence
  Description of Artificial Sequence: Synthetic polypeptide
EVQLVESGGGLVQPGRSLTLSCAASTNIPSISPMGWYRQAPGKQRELVAAIHGESTLYADSVKGRFTISRDNAKNSIYLQMNSLRPEDTALYYCNKVPWGDYHPRNVYWGQGTQVTVSS

SEQ ID NO: 168 - protein, 119 aa, Artificial Sequence
  Description of Artificial Sequence: Synthetic polypeptide
EVQLVESGGGLVQPGRSLTLSCAASTNIPSISPMGWYRQAPGKQRELVAAIHGDSTLYADSVKGRFTISRDNAKNSIYLQMNSLRPEDTALYYCNKVPWGDYHPRNVYWGQGTQVTVSS

SEQ ID NO: 169 - protein, 119 aa, Artificial Sequence
  Description of Artificial Sequence: Synthetic polypeptide
EVQLVESGGGLVQPGRSLTLSCAASTNITSISPMGWYRQAPGKQRELVAAIHGVSTLYADSVKGRFTISRDNAKNSIYLQMNSLRPEDTALYYCNKVPWGDYHPRNVQWGQGTQVTVSS

SEQ ID NO: 170 - protein, 119 aa, Artificial Sequence
  Description of Artificial Sequence: Synthetic polypeptide
EVQLVESGGGLVQPGRSLTLSCAASTNIPSISPMGWYRQAPGKQRELVAAIHGQSTLYADSVKGRFTISRDNAKNSIYLQMNSLRPEDTALYYCNKVPWGDYHPRNVQWGQGTQVTVSS

SEQ ID NO: 171 - protein, 119 aa, Artificial Sequence
  Description of Artificial Sequence: Synthetic polypeptide
EVQLVESGGGLVQPGRSLTLSCAASTNIVSISPMGWYRQAPGKQRELVAAIHGDSTLYADSVKGRFTISRDNAKNSIYLQMNSLRPEDTALYYCNKVPWGDYHPRNVSWGQGTQVTVSS

SEQ ID NO: 172 - protein, 119 aa, Artificial Sequence
  Description of Artificial Sequence: Synthetic polypeptide
EVQLVESGGGLVQPGRSLTLSCAASSNIFSISPMGWYRQAPGKQRELVAAIHGESTLYADSVKGRFTISRDNAKNSIYLQMNSLRPEDTALYYCNKVPWGDYHPRNVTWGQGTQVTVSS

SEQ ID NO: 173 - protein, 119 aa, Artificial Sequence
  Description of Artificial Sequence: Synthetic polypeptide
EVQLVESGGGLVQPGRSLTLSCAASTNIDSISPMGWYRQAPGKQRELVAAIHGESTLYADSVKGRFTISRDNAKNSIYLQMNSLRPEDTALYYCNKVPWGDYHPRNVTWGQGTQVTVSS

SEQ ID NO: 174 - protein, 119 aa, Artificial Sequence
  Description of Artificial Sequence: Synthetic polypeptide
EVQLVESGGGLVQPGRSLTLSCAASTNIDSISPMGWYRQAPGKQRELVAAIHGSSTLYADSVKGRFTISRDNAKNSIYLQMNSLRPEDTALYYCNKVPWGDYHPRNVTWGQGTQVTVSS

SEQ ID NO: 175 - protein, 119 aa, Artificial Sequence
  Description of Artificial Sequence: Synthetic polypeptide
EVQLVESGGGLVQPGRSLTLSCAASTNIRSISPMGWYRQAPGKQRELVAAIHGSSTLYADSVKGRFTISRDNAKNSIYLQMNSLRPEDTALYYCNKVPWGDYHPRNVVWGQGTQVTVSS

SEQ ID NO: 176 - protein, 119 aa, Artificial Sequence
  Description of Artificial Sequence: Synthetic polypeptide
EVQLVESGGGLVQPGRSLTLSCAASTNITSISPMGWYRQAPGKQRELVAAISGFSTLYADSVKGRFTISRDNAKNSIYLQMNSLRPEDTALYYCNEVPWGDYHPRNVYWGQGTQVTVSS

SEQ ID NO: 177 - protein, 119 aa, Artificial Sequence
  Description of Artificial Sequence: Synthetic polypeptide
EVQLVESGGGLVQPGRSLTLSCAASTNITSISPMGWYRQAPGKQRELVAAIHGESTLYADSVKGRFTISRDNAKNSIYLQMNSLRPEDTALYYCNKVPWGDYHPRNVYWGQGTQVTVSS

SEQ ID NO: 178 - protein, 119 aa, Artificial Sequence
  Description of Artificial Sequence: Synthetic polypeptide
EVQLVESGGGLVQPGRSLTLSCAASTNITSVSPMGWYRQAPGKQRELVAAIHGPSTLYADSVKGRFTISRDNAKNSIYLQMNSLRPEDTALYYCNKVPWGDYHPTNVYWGQGTQVTVSS

SEQ ID NO: 179 - protein, 119 aa, Artificial Sequence
  Description of Artificial Sequence: Synthetic polypeptide
EVQLVESGGGLVQPGRSLTLSCAASTNIGSISPMGWYRQAPGKQRELVAAIHGQSTLYADSVKGRFTISRDNAKNSIYLQMNSLRPEDTALYYCNKVPWGDYHPQNVYWGQGTQVTVSS

SEQ ID NO: 180 - protein, 119 aa, Artificial Sequence
  Description of Artificial Sequence: Synthetic polypeptide
EVQLVESGGGLVQPGRSLTLSCAASTNIESISPMGWYRQAPGKQRELVAAIHGKSTLYADSVKGRFTISRDNAKNSIYLQMNSLRPEDTALYYCNKVPWGDYHPRRVYWGQGTQVTVSS

SEQ ID NO: 181-188 - skipped (8 entries)

SEQ ID NO: 189 - protein, 119 aa, Artificial Sequence
  Description of Artificial Sequence: Synthetic polypeptide
EVQLVESGGGLVQPGRSLTLSCAASTNIVSISPMGWYRQAPGKQRELVAAIHGDSTLYADSVKGRFTISRDNAKNSIYLQMNSLRPEDTALYYCNKVPWGDYHPRRVYWGQGTQVTVSS

SEQ ID NO: 190 - protein, 119 aa, Artificial Sequence
  Description of Artificial Sequence: Synthetic polypeptide
EVQLVESGGGLVQPGRSLTLSCAASTNIDSISPMGWYRQAPGKQRELVAAIHGNSTLYADSVKGRFTISRDNAKNSIYLQMNSLRPEDTALYYCNKVPWGDYHPRMVYWGQGTQVTVSS

SEQ ID NO: 191 - protein, 119 aa, Artificial Sequence
  Description of Artificial Sequence: Synthetic polypeptide
EVQLVESGGGLVQPGRSLTLSCAASTNIFMISPMGWYRQAPGKQRELVAAIHGDSTLYADSVKGRFTISRDNAKNSIYLQMNSLRPEDTALYYCNKVPWGRYHPRNVYWGQGTQVTVSS

SEQ ID NO: 192 - protein, 119 aa, Artificial Sequence
  Description of Artificial Sequence: Synthetic polypeptide
EVQLVESGGGLVQPGRSLTLSCAASTNIFRISPMGWYRQAPGKQRELVAAIHGDSTLYADSVKGRFTISRDNAKNSIYLQMNSLRPEDTALYYCNKVPWGRYHPRNVYWGQGTQVTVSS

SEQ ID NO: 193 - protein, 119 aa, Artificial Sequence
  Description of Artificial Sequence: Synthetic polypeptide
EVQLVESGGGLVQPGRSLTLSCAASTNIFSISPMGWYRQAPGKQRELVAAIHGDSTLYADSVKGRFTISRDNAKNSIYLQMNSLRPEDTALYYCNKVPWGEYHPRNVYWGQGTQVTVSS

SEQ ID NO: 194 - protein, 119 aa, Artificial Sequence
  Description of Artificial Sequence: Synthetic polypeptide
EVQLVESGGGLVQPGRSLTLSCAASTNIFSISPMGWYRQAPGKQRELVAAIHGDSTLYADSVKGRFTISRDNAKNSIYLQMNSLRPEDTALYYCNKVPWGKYHPRNVYWGQGTQVTVSS

SEQ ID NO: 195 - protein, 119 aa, Artificial Sequence
  Description of Artificial Sequence: Synthetic polypeptide
EVQLVESGGGLVQPGRSLTLSCAASTNIESISPMGWYRQAPGKQRELVAAIHGSSTLYADSVKGRFTISRDNAKNSIYLQMNSLRPEDTALYYCNKVPWGRYHPRNVYWGQGTQVTVSS

SEQ ID NO: 196 - protein, 119 aa, Artificial Sequence
  Description of Artificial Sequence: Synthetic polypeptide
EVQLVESGGGLVQPGRSLTLSCAASTNIESISPMGWYRQAPGKQRELVAAIHGNSTLYADSVKGRFTISRDNAKNSIYLQMNSLRPEDTALYYCNKVPWGRYHPRNVYWGQGTQVTVSS

SEQ ID NO: 197 - protein, 119 aa, Artificial Sequence
  Description of Artificial Sequence: Synthetic polypeptide
EVQLVESGGGLVQPGRSLTLSCAASTNISSISPMGWYRQAPGKQRELVAAIHGFSTLYADSVKGRFTISRDNAKNSIYLQMNSLRPEDTALYYCNKVPWGYYHPRNVYWGQGTQVTVSS

SEQ ID NO: 198 - protein, 119 aa, Artificial Sequence
  Description of Artificial Sequence: Synthetic polypeptide
EVQLVESGGGLVQPGRSLTLSCAASTNISSISPMGWYRQAPGKQRELVAAIHGHSTLYADSVKGRFTISRDNAKNSIYLQMNSLRPEDTALYYCNKVPWGRYHPRNVYWGQGTQVTVSS

SEQ ID NO: 199 - protein, 119 aa, Artificial Sequence
  Description of Artificial Sequence: Synthetic polypeptide
EVQLVESGGGLVQPGRSLTLSCAASTNISSISPMGWYRQAPGKQRELVAAIHGFSTVYADSVKGRFTISRDNAKNSIYLQMNSLRPEDTALYYCNKVPWGRYHPRNVYWGQGTQVTVSS

SEQ ID NO: 200 - protein, 119 aa, Artificial Sequence
  Description of Artificial Sequence: Synthetic polypeptide
EVQLVESGGGLVQPGRSLTLSCAASTNIFSIRPMGWYRQAPGKQRELVAAIHGFSTVYADSVKGRFTISRDNAKNSIYLQMNSLRPEDTALYYCNKVPWGDYHPRNVYWGQGTQVTVSS

SEQ ID NO: 201 - protein, 119 aa, Artificial Sequence
  Description of Artificial Sequence: Synthetic polypeptide
EVQLVESGGGLVQPGRSLTLSCAASTNIFSIYPMGWYRQAPGKQRELVAAIHGFSTYYADSVKGRFTISRDNAKNSIYLQMNSLRPEDTALYYCNKVPWGSYHPRNVYWGQGTQVTVSS

SEQ ID NO: 202 - protein, 119 aa, Artificial Sequence
  Description of Artificial Sequence: Synthetic polypeptide
EVQLVESGGGLVQPGRSLTLSCAASTNIFNISPMGWYRQAPGKQRELVAAIHGFSTYYADSVKGRFTISRDNAKNSIYLQMNSLRPEDTALYYCNKVPWGRYHPRNVYWGQGTQVTVSS

SEQ ID NO: 203 - protein, 119 aa, Artificial Sequence
  Description of Artificial Sequence: Synthetic polypeptide
EVQLVESGGGLVQPGRSLTLSCAASTNIFSSSPMGWYRQAPGKQRELVAAIHGFSTWYADSVKGRFTISRDNAKNSIYLQMNSLRPEDTALYYCNKVPWGRYHPRNVYWGQGTQVTVSS

SEQ ID NO: 204 - protein, 119 aa, Artificial Sequence
  Description of Artificial Sequence: Synthetic polypeptide
EVQLVESGGGLVQPGRSLTLSCAASTNISSISPMGWYRQAPGKQRELVAAIHGFDTLYADSVKGRFTISRDNAKNSIYLQMNSLRPEDTALYYCNKVPWGDYHPRNVYWGQGTQVTVSS

SEQ ID NO: 205 - protein, 119 aa, Artificial Sequence
  Description of Artificial Sequence: Synthetic polypeptide
EVQLVESGGGLVQPGRSLTLSCAASTNIFSINPMGWYRQAPGKQRELVAAIHGFDTLYADSVKGRFTISRDNAKNSIYLQMNSLRPEDTALYYCNKVPWGDYHPRNVSWGQGTQVTVSS

SEQ ID NO: 206 - protein, 119 aa, Artificial Sequence
  Description of Artificial Sequence: Synthetic polypeptide
EVQLVESGGGLVQPGRSLTLSCAASTNIFSITPMGWYRQAPGKQRELVAAIHGRSTLYADSVKGRFTISRDNAKNSIYLQMNSLRPEDTALYYCNKVPWGSYHPRNVYWGQGTQVTVSS

SEQ ID NO: 207 - protein, 119 aa, Artificial Sequence
  Description of Artificial Sequence: Synthetic polypeptide
EVQLVESGGGLVQPGRSLTLSCAASTNIFSITPMGWYRQAPGKQRELVAAIHGTSTLYADSVKGRFTISRDNAKNSIYLQMNSLRPEDTALYYCNKVPWGRYHPRNVYWGQGTQVTVSS

SEQ ID NO: 208 - protein, 119 aa, Artificial Sequence
  Description of Artificial Sequence: Synthetic polypeptide
EVQLVESGGGLVQPGRSLTLSCAASTNIFSITPMGWYRQAPGKQRELVAAIHGESTLYADSVKGRFTISRDNAKNSIYLQMNSLRPEDTALYYCNKVPWGRYHPRNVYWGQGTQVTVSS

SEQ ID NO: 209 - protein, 119 aa, Artificial Sequence
  Description of Artificial Sequence: Synthetic polypeptide
EVQLVESGGGLVQPGRSLTLSCAASTNIFSITPMGWYRQAPGKQRELVAAIHGESTLYADSVKGRFTISRDNAKNSIYLQMNSLRPEDTALYYCNKVPWGDYHPRDVYWGQGTQVTVSS

SEQ ID NO: 210 - protein, 119 aa, Artificial Sequence
  Description of Artificial Sequence: Synthetic polypeptide
EVQLVESGGGLVQPGRSLTLSCAASTNIFSTSPYGWYRQAPGKQRELVAAIHGFSTIYADSVKGRFTISRDNAKNSIYLQMNSLRPEDTALYYCNKVPWGDYHPGNVYWGQGTQVTVSS

SEQ ID NO: 211 - protein, 119 aa, Artificial Sequence
  Description of Artificial Sequence: Synthetic polypeptide
EVQLVESGGGLVQPGRSLTLSCAASTNIFSTSPGGWYRQAPGKQRELVAAIHGFSTIYADSVKGRFTISRDNAKNSIYLQMNSLRPEDTALYYCNKVPWGDYHPGNVYWGQGTQVTVSS

SEQ ID NO: 212 - protein, 119 aa, Artificial Sequence
  Description of Artificial Sequence: Synthetic polypeptide
EVQLVESGGGLVQPGRSLTLSCAASTNIFSITPYGWYRQAPGKQRELVAAIHGASTLYADSVKGRFTISRDNAKNSIYLQMNSLRPEDTALYYCNKVPWGDYHPGNVYWGQGTQVTVSS

SEQ ID NO: 213 - protein, 119 aa, Artificial Sequence
  Description of Artificial Sequence: Synthetic polypeptide
EVQLVESGGGLVQPGRSLTLSCAASTNIFSITPGGWYRQAPGKQRELVAAIHGASTLYADSVKGRFTISRDNAKNSIYLQMNSLRPEDTALYYCNKVPWGDYHPGNVYWGQGTQVTVSS

SEQ ID NO: 214 - protein, 119 aa, Artificial Sequence
  Description of Artificial Sequence: Synthetic polypeptide
QVQLVESGGGLVQPGESLRLSCAASTNIFSISPMGWYRQAPGKQRELVAAIHGFSTLYADSVKGRFTISRDNAKNTIYLQMNSLKPEDTAVYYCNKVPWGDYHPRNVYWGQGTQVTVSS

SEQ ID NO: 215 - protein, 110 aa, Artificial Sequence
  Description of Artificial Sequence: Synthetic polypeptide
QVQLVESGGGLVQPGGSLRLSCAASGRTFSVRGMAWYRQAGNNRALVATMNPDGFPNYADAVKGRFTISWDIAENTVYLQMNSLNSEDTTVYYCNSGPYWGQGTQVTVSS

SEQ ID NO: 216 - protein, 123 aa, Artificial Sequence
  Description of Artificial Sequence: Synthetic polypeptide
QVQLVESGGGLVQAGGSLRLSCAASGSIPSIEQMGWYRQAPGKQRELVAALTSGGRANYADSVKGRFTISGDNVRNMVYLQMNSLKPEDTAIYYCSAGRFKGDYAQRSGMDYWGKGTLVTVSS

SEQ ID NO: 217 - protein, 116 aa, Artificial Sequence
  Description of Artificial Sequence: Synthetic polypeptide
QVQLVESGGGLVQAGGSLRLSCAFSGTTYTFDLMSWYRQAPGKQRTVVASISSDGRTSYADSVRGRFTISGENGKNTVYLQMNSLKLEDTAVYYCLGQRSGVRAFWGQGTQVTVSS

SEQ ID NO: 218 - protein, 123 aa, Artificial Sequence
  Description of Artificial Sequence: Synthetic polypeptide
QVQLVESGGGLVQAGGSLRLSCVASGSTSNINNMRWYRQAPGKERELVAVITRGGYAIYLDAVKGRFTISRDNANNAIYLEMNSLKPEDTAVYVCNADRVEGTSGGPQLRDYFGQGTQVTVSS

SEQ ID NO: 219 - protein, 116 aa, Artificial Sequence
  Description of Artificial Sequence: Synthetic polypeptide
QVQLVESGGGLVQAGGSLRLSCAASGSTFGINAMGWYRQAPGKQRELVAVISRGGSTNYADSVKGRFTISRDNAENTVSLQMNTLKPEDTAVYFCNARTYTRHDYWGQGTQVTVSS

SEQ ID NO: 220 - protein, 122 aa, Artificial Sequence
  Description of Artificial Sequence: Synthetic polypeptide
QVRLVESGGGLVQAGGSLRLSCAASISAFRLMSVRWYRQDPSKQREWVATIDQLGRTNYADSVKGRFAISKDSTRNTVYLQMNMLRPEDTAVYYCNAGGGPLGSRWLRGRHWGQGTQVTVSS

SEQ ID NO: 221 - protein, 119 aa, Artificial Sequence
  Description of Artificial Sequence: Synthetic polypeptide
QVRLVESGGGLVQAGESLRLSCAASGRPFSINTMGWYRQAPGKQRELVASISSSGDFTYTDSVKGRFTISRDNAKNTVYLQMNSLKPEDTAVYYCNARRTYLPRRFGSWGQGTQVTVSS

SEQ ID NO: 222 - protein, 117 aa, Artificial Sequence
  Description of Artificial Sequence: Synthetic polypeptide
QVQPVESGGGLVQPGGSLRLSCVVSGSDFTEDAMAWYRQASGKERESVAFVSKDGKRILYLDSVRGRFTISRDIDKKTVYLQMDNLKPEDTGVYYCNSAPGAARNYWGQGTQVTVSS

SEQ ID NO: 223 - protein, 117 aa, Artificial Sequence
  Description of Artificial Sequence: Synthetic polypeptide
QVQPVESGGGLVQPGGSLRLSCVVSGSDFTEDAMAWYRQASGKERESVAFVSKDGKRILYLDSVRGRFTISRDIYKKTVYLQMDNLKPEDTGVYYCNSAPGAARNVWGQGTQVTVSS

SEQ ID NO: 224 - protein, 115 aa, Artificial Sequence [sequence omitted]

SEQ ID NO: 225 - protein, 124 aa, Artificial Sequence
  Description of Artificial Sequence: Synthetic polypeptide
QVQIVESGGGLVQAGGSLRLSCVASGLTYSIVAVGWYRQAPGKEREMVADISPVGNTNYADSVKGRFTISKENAKNTVYLQMNSLKPEDTAVYYCHIVRGWLDERPGPGPIVYWGQGTQVTVSS

SEQ ID NO: 226 - protein, 115 aa, Artificial Sequence
  Description of Artificial Sequence: Synthetic polypeptide
QVQLVESGGGLVQTGGSLRLSCAASGLTFGVYGMEWFRQAPGKQREWVASHTSTGYVYYRDSVKGRFTISRDNAKSTVYLQMNSLKPEDTAIYYCKANRGSYEYWGQGTQVTVSS

SEQ ID NO: 227 - protein, 114 aa, Artificial Sequence
  Description of Artificial Sequence: Synthetic polypeptide
QVQLVESGGGLVQAGGSLRLSCAASTTSSINSMSWYRQAQGKQREPVAVITDRGSTSYADSVKGRFTISRDNAKNTVYLQMNSLKPEDTAIYTCHVIADWRGYWGQGTQVTVSS

SEQ ID NO: 228 - protein, 120 aa, Artificial Sequence
  Description of Artificial Sequence: Synthetic polypeptide
QVQLVESGGGLVQAGGSLRLSCAASGRTLSRYAMGWFRQAPGKERQFVAAISRSGGTTRYSDSVKGRFTISRDNAANTFYLQMNNLRPDDTAVYYCNVRRRGWGRTLEYWGQGTQVTVSS

SEQ ID NO: 229 - protein, 117 aa, Artificial Sequence
  Description of Artificial Sequence: Synthetic polypeptide
QVQLGESGGGLVQAGGSLRLSCAASGSIFSPNAMIWHRQAPGKQREPVASINSSGSTNYGDSVKGRFTVSRDIVKNTMYLQMNSLKPEDTAVYYCSYSDFRRGTQYWGQGTQVTVSS

SEQ ID NO: 230 - protein, 119 aa, Artificial Sequence
  Description of Artificial Sequence: Synthetic polypeptide
QVQLVESGGGLVPSGGSLRLSCAASGATSAITNLGWYRRAPGQVREMVARISVREDKEDYEDSVKGRFTISRDNTQNLVYLQMNNLQPHDTAIYYCGAQRWGRGPGTTWGQGTQVTVSS

SEQ ID NO: 231 - protein, 116 aa, Artificial Sequence
  Description of Artificial Sequence: Synthetic polypeptide
QVQLVESGGGLVQAGGSLRLSCAASGSTFRIRVMRWYRQAPGTERDLVAVISGSSTYYADSVKGRFTISRDNAKNTLYLQMNNLKPEDTAVYYCNADDSGIARDYWGQGTQVTVSS

SEQ ID NO: 232 - protein, 118 aa, Artificial Sequence
  Description of Artificial Sequence: Synthetic polypeptide
QVQLVESGGGLVQAGESRRLSCAVSGDTSKFKAVGWYRQAPGAQRELLAWINNSGVGNTAESVKGRFTISRDNAKNTVYLQMNRLTPEDTDVYYCRFYRRFGINKNYWGQGTQVTVSS

SEQ ID NO: 233 - protein, 122 aa, Artificial Sequence
  Description of Artificial Sequence: Synthetic polypeptide
QVQLVESGGGLVQAGGSLRLSCAASGSTFGNKPMGWYRQAPGKQRELVAVISSDGGSTRYAALVKGRFTISRDNAKNTVYLQMESLVAEDTAVYYCNALRTYYLNDPVVFSWGQGTQVTVSS

SEQ ID NO: 234 - protein, 119 aa, Artificial Sequence
  Description of Artificial Sequence: Synthetic polypeptide
QVQLVESGGGLVQAGGSLRLSCAASGSTSSINTMYWYRQAPGKERELVAFISSGGSTNVRDSVKGRFSVSRDSAKNIVYLQMNSLTPEDTAVYYCNTYIPLRGTLHDYWGQGTQVTVSS

SEQ ID NO: 235 - protein, 115 aa, Artificial Sequence
  Description of Artificial Sequence: Synthetic polypeptide
QVQLVESGGGLVQAGGSLRLSCVASGRTDRITTMGWYRQAPGKQRELVATISNRGTSNYANSVKGRFTISRDNAKNTVYLQMNSLKPEDTAVYYCNARKWGRNYWGQGTQVTVSS

SEQ ID NO: 236 - protein, 119 aa, Artificial Sequence
  Description of Artificial Sequence: Synthetic polypeptide
QVQLVESGGGLVQARGSLRLSCTASGRTIGINDMAWYRQAPGNQRELVATITKGGTTDYADSVDGRFTISRDNAKNTVYLQMNSLKPEDTAVYYCNTKRREWAKDFEYWGQGTQVTVSS

SEQ ID NO: 237 - protein, 114 aa, Artificial Sequence
  Description of Artificial Sequence: Synthetic polypeptide
QVQLVESGGGLVQAGGSLRLSCAASAIGSINSMSWYRQAPGKQREPVAVITDRGSTSYADSVKGRFTISRDNAKNTVYLQMNSLKPEDTAIYTCHVIADWRGYWGQGTQVTVSS

SEQ ID NO: 238 - protein, 119 aa, Artificial Sequence
  Description of Artificial Sequence: Synthetic polypeptide
QVQLVESGGGLVQAGGSLRLSCAASGSTSSINTMYWFRQAPGEERELVATINRGGSTNVRDSVKGRFSVSRDSAKNIVYLQMNRLKPEDTAVYYCNTYIPYGGTLHDFWGQGTQVTVSS

SEQ ID NO: 239 - protein, 114 aa, Artificial Sequence
  Description of Artificial Sequence: Synthetic polypeptide
QVQLVESGGGLVQAGGSLRLSCTTSTTFSINSMSWYRQAPGNQREPVAVITNRGTTSYADSVKGRFTISRDNARNTVYLQMDSLKPEDTAIYTCHVIADWRGYWGQGTQVTVSS

SEQ ID NO: 240 - protein, 116 aa, Artificial Sequence
  Description of Artificial Sequence: Synthetic polypeptide
QVQLVESGGGLVQAGGSLTLSCAASGSTFSIRAMRWYRQAPGTERDLVAVIYGSSTYYADAVKGRFTISRDNAKNTLYLQMNNLKPEDTAVYYCNADTIGTARDYWGQGTQVTVSS

SEQ ID NO: 241 - protein, 117 aa, Artificial Sequence
  Description of Artificial Sequence: Synthetic polypeptide
QVQLVESGGGLVQAGGSLRLSCVASGRTSTIDTMYWHRQAPGNERELVAYVTSRGTSNVADSVKGRFTISRDNAKNTAYLQMNSLKPEDTAVYYCSVRTTSYPVDFWGQGTQVTVSS

SEQ ID NO: 242 - protein, 119 aa, Artificial Sequence
  Description of Artificial Sequence: Synthetic polypeptide
QVQLVESGGGLVQAGGSLRLSCAASGSTSSINTMYWYRQAPGKERELVAFISSGGSTNVRDSVKGRFSVSRDSAKNIVYLQMNSLKPEDTAVYYCNTYIPYGGTLHDFWGQGTQVTVSS

SEQ ID NO: 243 - protein, 111 aa, Artificial Sequence
  Description of Artificial Sequence: Synthetic polypeptide
QVQLVESGGGLVQPGGSLRLSCAASGGDWSANFMYWYRQAPGKQRELVARISGRGVVDYVESVKGRFTISRDNAKNTVYLQMNSLKPEDTAVYYCAVASYWGQGTQVTVSS

SEQ ID NO: 244 - protein, 111 aa, Artificial Sequence
  Description of Artificial Sequence: Synthetic polypeptide
EVQLVESGGGLVQPGGSLRLSCAASGGDWSANFMYWYRQAPGKQRELVARISGRGVVDYVESVKGRFTISRDNSKNTLYLQMNSLRAEDTAVYYCAVASYWGQGTLVTVSS

SEQ ID NO: 245 - protein, 111 aa, Artificial Sequence
  Description of Artificial Sequence: Synthetic polypeptide
EVQLVESGGGLVQPGGSLRLSCAASGGDWSANFMYWVRQAPGKGLEWVSRISGRGVVDYVESVKGRFTISRDNSKNTLYLQMNSLRAEDTAVYYCAVASYWGQGTLVTVSS

SEQ ID NO: 246 - protein, 119 aa, Artificial Sequence
  Description of Artificial Sequence: Synthetic polypeptide
EVQLVESGGGLVQAGGSLRLSCAASGSTSSINTMYWYRQAPGKERELVAFISSGGSTNVRDSVKGRFTISRDNSKNTLYLQMNSLRAEDTAVYYCNTYIPYGGTLHDFWGQGTLVTVSS

SEQ ID NO: 247 - protein, 119 aa, Artificial Sequence
  Description of Artificial Sequence: Synthetic polypeptide
EVQLVESGGGLVQPGGSLRLSCAASGSTSSINTMYWYRQAPGKERELVAFISSGGSTNVRDSVKGRFTISRDNSKNTLYLQMNSLRAEDTAVYYCNTYIPYGGTLHDFWGQGTLVTVSS

SEQ ID NO: 248 - protein, 119 aa, Artificial Sequence
  Description of Artificial Sequence: Synthetic polypeptide
EVQLVESGGGLVQPGGSLRLSCAASGSTSSINTMYWVRQAPGKGLEWVSFISSGGSTNVRDSVKGRFTISRDNSKNTLYLQMNSLRAEDTAVYYCNTYIPYGGTLHDFWGQGTLVTVSS

SEQ ID NO: 249 - protein, 116 aa, Artificial Sequence
  Description of Artificial Sequence: Synthetic polypeptide
QVQLVESGGGVVQAGGSLRLSCAASGSTFSIRAMRWYRQAPGTERDLVAVIYGSSTYYADAVKGRFTISRDNSKNTLYLQMNSLRAEDTAVYYCNADTIGTARDYWGQGTLVTVSS

SEQ ID NO: 250 - protein, 118 aa, Artificial Sequence
  Description of Artificial Sequence: Synthetic polypeptide
QVQLVESGGGVVQPGGSLRLSCAASGSTFSIRAMRWYRQAPGKERELVAVIYGSSTYYADAVKGRFTISRDNSKNTLYLQMNSLRAEDTAVYYCNADTIGTARDYWGQGTLVTVSSGG

SEQ ID NO: 251 - protein, 118 aa, Artificial Sequence
  Description of Artificial Sequence: Synthetic polypeptide
QVQLVESGGGVVQPGGSLRLSCAASGSTFSIRAMRWVRQAPGKGLEWVSVIYGSSTYYADAVKGRFTISRDNSKNTLYLQMNSLRAEDTAVYYCNADTIGTARDYWGQGTLVTVSSGG

SEQ ID NO: 252 - protein, 118 aa, Artificial Sequence
  Description of Artificial Sequence: Synthetic polypeptide
EVQLVESGGGLVQAGGSLRLSCVASGRTSTIDTMYWHRQAPGNERELVAYVTSRGTSNVADSVKGRFTISRDNSKNTLYLQMNSLRAEDTAVYYCSVRTTSYPVDFWGQGTLVTVSGG

SEQ ID NO: 253 - protein, 117 aa, Artificial Sequence
  Description of Artificial Sequence: Synthetic polypeptide
EVQLVESGGGLVQPGGSLRLSCAASGRTSTIDTMYWHRQAPGKERELVAYVTSRGTSNVADSVKGRFTISRDNSKNTLYLQMNSLRAEDTAVYYCSVRTTSYPVDFWGQGTLVTVSS

SEQ ID NO: 254 - protein, 117 aa, Artificial Sequence
  Description of Artificial Sequence: Synthetic polypeptide
EVQLVESGGGLVQPGGSLRLSCAASGRTSTIDTMYWVRQAPGKGLEWVSYVTSRGTSNVADSVKGRFTISRDNSKNTLYLQMNSLRAEDTAVYYCSVRTTSYPVDFWGQGTLVTVSS

SEQ ID NO: 255 - protein, 116 aa, Artificial Sequence
  Description of Artificial Sequence: Synthetic polypeptide
QVQLVESGGGVVQAGGSLTLSCAASGSTFSIRAMRWYRQAPGTERDLVAVIYGSSTYYADAVKGRFTISRDNSKNTLYLQMNSLRAEDTAVYYCNADTIGTARDYWGQGTLVTVSS

SEQ ID NO: 256 - protein, 116 aa, Artificial Sequence; identical to SEQ ID NO: 249
  Description of Artificial Sequence: Synthetic polypeptide

SEQ ID NO: 257 - protein, 116 aa, Artificial Sequence
  Description of Artificial Sequence: Synthetic polypeptide
QVQLVESGGGVVQPGGSLRLSCAASGSTFSIRAMRWYRQAPGKERELVAVIYGSSTYYADAVKGRFTISRDNSKNTLYLQMNSLRAEDTAVYYCNADTIGTARDYWGQGTLVTVSS

SEQ ID NO: 258 - protein, 116 aa, Artificial Sequence
  Description of Artificial Sequence: Synthetic polypeptide
QVQLVESGGGVVQPGGSLRLSCAASGSTFSIRAMRWVRQAPGKGLEWVSVIYGSSTYYADAVKGRFTISRDNSKNTLYLQMNSLRAEDTAVYYCNADTIGTARDYWGQGTLVTVSS

SEQ ID NO: 259 - protein, 12 aa, Artificial Sequence
  Description of Artificial Sequence: Synthetic peptide
GGQDGNEEMGGG

SEQ ID NO: 260 - protein, 10 aa, Artificial Sequence
  Description of Artificial Sequence: Synthetic peptide
GGQDGNEEGG

SEQ ID NO: 261 - protein, 16 aa, Artificial Sequence
  Description of Artificial Sequence: Synthetic peptide
GGGGQDGNEEMGGGGG

SEQ ID NO: 262 - protein, 7 aa, Artificial Sequence
  Description of Artificial Sequence: Synthetic peptide
APFGSEM

SEQ ID NO: 263 - protein, 7 aa, Artificial Sequence
  Description of Artificial Sequence: Synthetic peptide
AWNGPYE

SEQ ID NO: 264 - protein, 10 aa, Artificial Sequence
  Description of Artificial Sequence: Synthetic peptide
AQDNGDTKTG

SEQ ID NO: 265 - protein, 8 aa, Artificial Sequence
  Description of Artificial Sequence: Synthetic peptide
AEAKETQG

SEQ ID NO: 266 - protein, 9 aa, Artificial Sequence
  Description of Artificial Sequence: Synthetic peptide
ATRREQVEG

SEQ ID NO: 267 - protein, 7 aa, Artificial Sequence
  Description of Artificial Sequence: Synthetic peptide
AQAPSQP

SEQ ID NO: 268 - protein, 10 aa, Artificial Sequence
  Description of Artificial Sequence: Synthetic peptide
ATRSRTRNDG

SEQ ID NO: 269 - protein, 10 aa, Artificial Sequence
  Description of Artificial Sequence: Synthetic peptide
ADVDAPDGLG

SEQ ID NO: 270 - protein, 9 aa, Artificial Sequence
  Description of Artificial Sequence: Synthetic peptide
AADISDPGG

SEQ ID NO: 271 - protein, 8 aa, Artificial Sequence
  Description of Artificial Sequence: Synthetic peptide
ALSVDPSG

SEQ ID NO: 272 - protein, 8 aa, Artificial Sequence
  Description of Artificial Sequence: Synthetic peptide
ARLSVDPG

SEQ ID NO: 273 - protein, 8 aa, Artificial Sequence
  Description of Artificial Sequence: Synthetic peptide
AVEAADRG

SEQ ID NO: 274 - protein, 12 aa, Artificial Sequence
  Description of Artificial Sequence: Synthetic peptide
GGPDGNEEMGGG

SEQ ID NO: 275 - protein, 12 aa, Artificial Sequence
  Description of Artificial Sequence: Synthetic peptide
GGFDGNEEMGGG

SEQ ID NO: 276 - protein, 12 aa, Artificial Sequence
  Description of Artificial Sequence: Synthetic peptide
GGGDGNEEMGGG

SEQ ID NO: 277 - protein, 12 aa, Artificial Sequence
  Description of Artificial Sequence: Synthetic peptide
GGEMDGEGQNGG

SEQ ID NO: 278 - protein, 14 aa, Artificial Sequence
  Description of Artificial Sequence: Synthetic peptide
GGGGGPDGNEEPGG

SEQ ID NO: 279 - protein, 14 aa, Artificial Sequence
  Description of Artificial Sequence: Synthetic peptide
GGGGSLDGNEEPGG

SEQ ID NO: 280 - protein, 14 aa, Artificial Sequence
  Description of Artificial Sequence: Synthetic peptide
GGGGALDGNEEPGG

SEQ ID NO: 281 - protein, 14 aa, Artificial Sequence
  Description of Artificial Sequence: Synthetic peptide
GGGGGLDGNEEPGG

SEQ ID NO: 282 - protein, 13 aa, Artificial Sequence
  Description of Artificial Sequence: Synthetic peptide
GGGALDGNEEPGG

SEQ ID NO: 283 - protein, 15 aa, Artificial Sequence
  Description of Artificial Sequence: Synthetic peptide
GGGGGPDGNEEPGGG

SEQ ID NO: 284 - protein, 14 aa, Artificial Sequence
  Description of Artificial Sequence: Synthetic peptide
GGSGALDGNEEPGG

SEQ ID NO: 285 - protein, 14 aa, Artificial Sequence
  Description of Artificial Sequence: Synthetic peptide
GGSGSLDGNEEPGG

SEQ ID NO: 286 - protein, 14 aa, Artificial Sequence
  Description of Artificial Sequence: Synthetic peptide
GGSGGPDGNEEPGG

SEQ ID NO: 287 - protein, 15 aa, Artificial Sequence
  Description of Artificial Sequence: Synthetic peptide
GGVRDGPDGNEEPGG

SEQ ID NO: 288 - protein, 16 aa, Artificial Sequence
  Description of Artificial Sequence: Synthetic peptide
GGSGGPDGNEEPGGGG

SEQ ID NO: 289 - protein, 14 aa, Artificial Sequence
  Description of Artificial Sequence: Synthetic peptide
GGGRGPDGNEEPGG

SEQ ID NO: 290 - protein, 14 aa, Artificial Sequence
  Description of Artificial Sequence: Synthetic peptide
GGSGGLDGNEEPGG

SEQ ID NO: 291 - protein, 14 aa, Artificial Sequence
  Description of Artificial Sequence: Synthetic peptide
GGGVGPDGNEEPGG

SEQ ID NO: 292 - protein, 14 aa, Artificial Sequence
  Description of Artificial Sequence: Synthetic peptide
GGGEGPDGNEEPGG

SEQ ID NO: 293 - protein, 14 aa, Artificial Sequence
  Description of Artificial Sequence: Synthetic peptide
GGGVALDGNEEPGG

SEQ ID NO: 294 - protein, 14 aa, Artificial Sequence
  Description of Artificial Sequence: Synthetic peptide
GGGRALDGNEEPGG

SEQ ID NO: 295 - protein, 14 aa, Artificial Sequence
  Description of Artificial Sequence: Synthetic peptide
GGYAGLDGNEEPGG

SEQ ID NO: 296 - protein, 14 aa, Artificial Sequence
  Description of Artificial Sequence: Synthetic peptide
GGAGGPDGNEEPGG

SEQ ID NO: 297 - protein, 14 aa, Artificial Sequence
  Description of Artificial Sequence: Synthetic peptide
GGRGGPDGNEEPGG

SEQ ID NO: 298 - protein, 15 aa, Artificial Sequence
  Description of Artificial Sequence: Synthetic peptide
GGGGPDGNEEPGGGG

SEQ ID NO: 299 - protein, 14 aa, Artificial Sequence
  Description of Artificial Sequence: Synthetic peptide
GGGEALDGNEEPGG

SEQ ID NO: 300 - protein, 14 aa, Artificial Sequence
  Description of Artificial Sequence: Synthetic peptide
GGDASLDGNEEPGG

SEQ ID NO: 301 - protein, 13 aa, Artificial Sequence
  Description of Artificial Sequence: Synthetic peptide
GGRDAPDGNEEGG

SEQ ID NO: 302 - protein, 10 aa, Artificial Sequence
  Description of Artificial Sequence: Synthetic peptide
SGGGGSGGVV

SEQ ID NO: 303 - protein, 16 aa, Artificial Sequence
  Description of Artificial Sequence: Synthetic peptide
SGGGGSGGGGSGGGGS

SEQ ID NO: 304 - protein, 17 aa, Artificial Sequence
  Description of Artificial Sequence: Synthetic peptide
SGGGGSGGGGSGGGGGS

SEQ ID NO: 305 - protein, 10 aa, Artificial Sequence
  Description of Artificial Sequence: Synthetic peptide
SGGGGSGGGS

SEQ ID NO: 306 - protein, 115 aa, Artificial Sequence
  Description of Artificial Sequence: Synthetic polypeptide
QVQLQESGGGLVQAGGSLRLSCAASGSIFSIASMGWYRQAPGKQRELVAVITSFSSTNYADSVKGRFTISRDNAKNTVYLQMNSLKPEDTGVYYCNARYFERTDWGQGTQVTVSS

SEQ ID NO: 307 - protein, 115 aa, Artificial Sequence
  Description of Artificial Sequence: Synthetic polypeptide
QVQLQESGGGLVQAGGSLRLSCAAPGSIFSIASMGWYRQAPGKQRELVAVITSFSSTNYADSVKGRFTISRDNAKNTVYLQMNSLKPEDTGVYYCNARYFERTDWGQGTQVTVSS

SEQ ID NO: 308 - protein, 115 aa, Artificial Sequence
  Description of Artificial Sequence: Synthetic polypeptide
QVQLQESGGGLVQAGGSLRLSCAASGSIFSIASMAWYRQAPGKQRELVAAITSFSSTNYADSVKGRFTISRDNAKNTVYLQMNSLKPEDTGVYYCNARYFERTDWGQGTQVTVSS

SEQ ID NO: 309 - protein, 115 aa, Artificial Sequence
  Description of Artificial Sequence: Synthetic polypeptide
QVQLQESGGGLVQAGGSLRLSCAASESIFSINVMAWHRQAPGKQRELVARITSGGSTNYADSVKGRFTISRDNAKNTVYLQMNSLKPEDTGVYYCGAYQGLYAYWGQGTQVTVSS

SEQ ID NO: 310 - protein, 115 aa, Artificial Sequence
  Description of Artificial Sequence: Synthetic polypeptide
QVQLQESGGGLVQAGGSLRLSCVASGSSFSITSMAWYRQAPGKQRDLVAAITSFGSTNYADSVKDRFTISRDNAKNTVYLQMNSLKPEDTAVYYCNGRVFDHVYWGQGTQVTVSS

SEQ ID NO: 311 - protein, 115 aa, Artificial Sequence
  Description of Artificial Sequence: Synthetic polypeptide
QVQLQESGGGLVQAGGSLKLSCAASSSIFSISSMSWYRQAPGKQRELVAAITTFDYTNYADSVKGRFTISRDNAKNMMYLQMNSLKPEDTAVYLCNARAFGRDYWGQGTQVTVSS

SEQ ID NO: 312 - protein, 115 aa, Artificial Sequence
  Description of Artificial Sequence: Synthetic polypeptide
QVQLQESGGGLVQAGGSLKLSCAASSSIFSISSMSWYRQAPGKQRELVAAITSFGSTNYADSVKGRFTISRDNAKNMMYLQMNSLKPEDTAVYRCNARTMGRDYWGQGTQVTVSS

SEQ ID NO: 313 - protein, 116 aa, Artificial Sequence
  Description of Artificial Sequence: Synthetic polypeptide
QVQLQESGGGLVQPGGSLRLSCAASGSTLNIKIMAWHRQAPGKQRELVATLTSGGNTNYADSVKGRFTISRDNAKNTVYLQMNSLQPEDTAVYYCGLWDGVGGAYWGRGTQVTVSS

SEQ ID NO: 314 - protein, 116 aa, Artificial Sequence
  Description of Artificial Sequence: Synthetic polypeptide
QVQLQESGGGLVQPGGSLRISCAASGSTLNIKIMAWHRQAPGKQRELVATLTSGGNTNYADSVKGRFTISRDNAKNTVYLQMNSLQPEDTAVYYCGLWDGVGGAYWGRGTQVTVSS

SEQ ID NO: 315 - protein, 116 aa, Artificial Sequence
  Description of Artificial Sequence: Synthetic polypeptide
QVQLQESGGGLVQAGGSLRLSCAASGSTFNIKTMAWHRQAPGNQRELVATLTSGGNTNYADSVKGRFTISRDNAKNTVYLQMNSLKPEDTAVYYCGLWNGVGGAYWGRGTQVTVSS

SEQ ID NO: 316 - protein, 115 aa, Artificial Sequence
  Description of Artificial Sequence: Synthetic polypeptide
QVQLQDGGGLVQPGGSLRLSCAASGSTFNIKLMAWHRQAPGNQRELVATLTSGGNTNYADSVKGRFTISRDNASNIVYLQMNSLKPEDTAVYYCGLWDGVGGAYWGRGTQVTVSS

SEQ ID NO: 317 - protein, 116 aa, Artificial Sequence
  Description of Artificial Sequence: Synthetic polypeptide
QVQLQESGGGLVQAGGSLRLSCAASGSTFNFKIMAWHRQAPGKQRELVASLTSEGLTNYRDSVKGRFTISRDNAKNTVYLQMNNLKPEDTAVYYCGLWDGVGGAYWGRGTQVTVSS

SEQ ID NO: 318 - protein, 114 aa, Artificial Sequence
  Description of Artificial Sequence: Synthetic polypeptide
QVQLQESGGGLVQPGGSLRLSCAASGFMFSSYSMSWYRQAPGKQRELVAAITTWGSTNYADSVKGRFTISRDNAKNTVWLQMNSLEPEDTAVYFCNARSWNNYWGQGTQVTVSS

SEQ ID NO: 319 - protein, 114 aa, Artificial Sequence
  Description of Artificial Sequence: Synthetic polypeptide
QVQLQESGGGLVQVGGSLRLSCAASGFMFSSYSMSWYRQAPGKQRELVAAITSYGSTNYADSVKGRFTISRDNAKNTVWLQMNSLKPEDTAVYFCNARSWNNYWGQGTQVTVSS

SEQ ID NO: 320 - protein, 114 aa, Artificial Sequence
  Description of Artificial Sequence: Synthetic polypeptide
QVQLQESGGGLVQPGGSLRLSCAASGFTFSSHSMSWYRQAPGKQRELVAAITTYGSTNYIDSVKGRFTISRDNTKNTVYLQMNSLKPEDTAVYFCNARSWNNYWGQGTQVTVSS

SEQ ID NO: 321 - protein, 117 aa, Artificial Sequence
  Description of Artificial Sequence: Synthetic polypeptide
QVQLQESGGGLVQAGGSLRLSCVASGSSFSHNTMGWYRQAPGKQRDLVARITTFGTTNYADSVKGRFTISRDNAKNTVYLQMNSLKPEDTAVYYCNGESFGRIWYNWGQGTQVTVSS

SEQ ID NO: 322 - protein, 116 aa, Artificial Sequence
  Description of Artificial Sequence: Synthetic polypeptide
QVQLQESGGGLVQAGASLRLTCTASGGRFSYATMGWSRQAPGKQREMVARITSSGFSTNYADSVKGRFTISRDNAKNAVYLQMDSLKPEDTAVYYCNAQHFGTDSWGQGTQVTVSS

SEQ ID NO: 323 - protein, 116 aa, Artificial Sequence
  Description of Artificial Sequence: Synthetic polypeptide
QVQLQESGGGLVQAGASLRLTCTASGSRFSYATMGWSRQAPGKQRELVARITSSGFSTNYADSVKGRFTISRDNAKNAVYLQMDSLKPEDTAVYYCNAQQFGTDSWGQGTQVTVSS

SEQ ID NO: 324 - protein, 117 aa, Artificial Sequence
  Description of Artificial Sequence: Synthetic polypeptide
QVQLQESGGGLVQAGGSLRLSCAASGSTFTSNVMGWHRQAPGKQRELVANMHSGGSTNYADSVKGRFTISRDNAKNIVYLQMNNLKIEDTAVYYCRWYGIQRAEGYWGQGTQVTVSS

SEQ ID NO: 325 - protein, 117 aa, Artificial Sequence
  Description of Artificial Sequence: Synthetic polypeptide
QVQLQESGGGLVVAGGSLRLSCAASGSSVSFLSMAWYRQAPGKKRELVAGISVDGSTNYADSVKGRFTVSRDNAKNTVYLQMNSLQPEDTAVYYCYAYRWVGRDTYWGQGTQVTVSS

SEQ ID NO: 326 - protein, 117 aa, Artificial Sequence
  Description of Artificial Sequence: Synthetic polypeptide
QVQLQESGGGLVVAGGSLRLSCAASGSSVSFLSMAWYRQAPGKKRELVAGISVDGSTNYADSVKGRFTISRDNAKNTVYLQMNSLQPEDTAVYYCYAYRWVGRDTYWGQGTQVTVSS

SEQ ID NO: 327 - protein, 117 aa, Artificial Sequence
  Description of Artificial Sequence: Synthetic polypeptide
QVQLQESGGGLVVSGGSLRLSCAASGSSVSFLSMAWYRQAPGKKRELVAGISVDGSTNYADSVKGRFTISRDNAKNTVYLQMNSLQPEDTAAYYCYAYRWVGRDTYWGQGTQVTVSS

SEQ ID NO: 328 - protein, 117 aa, Artificial Sequence
  Description of Artificial Sequence: Synthetic polypeptide
QVQLQESGGGLVVAGGSLRLSCAASGSSVSFLSMAWYRQAPGKKRELVAGISVDGSTNYADSVKGRFTISRDNAENTVYLQMNSLQPEDTAVYYCYAYRWEGRDTYWGQGTQVTVSS

SEQ ID NO: 329 - protein, 117 aa, Artificial Sequence
  Description of Artificial Sequence: Synthetic polypeptide
QVQLQESGGGLVVAGGSLRLSCAASGSSVSFLSMAWYRQAPGKKRELVAGISVDGSTNYADSVKGRFTISRDNAENTVYLQMNSLQPEDTAVYYCYAYRWEGRNTYWGQGTQVTVSS

SEQ ID NO: 330 - protein, 117 aa, Artificial Sequence
  Description of Artificial Sequence: Synthetic polypeptide
QVQLQESGGGLVQPGGSLRLSCAASGSSVSFLSMAWYRQAPGKKRELVAGISTDGSTNYVDSVKGRFTISRDNAKNTVYLQMNSLQPEDTAVYYCYAYRWVGRYTYWGQGTQVTVSS

SEQ ID NO: 331 - protein, 117 aa, Artificial Sequence
  Description of Artificial Sequence: Synthetic polypeptide
QVQLQESGGGLVVAGGSLRLSCAASGSSVSFLSMAWYRQAPGKKRELVAGISTDGTTNYVDSVKDRFTISRDNAKNTVYLQMNSLQPEDTAAYYCYAYRWVGRDTYWGQGTQVTVSS

SEQ ID NO: 332 - protein, 117 aa, Artificial Sequence
  Description of Artificial Sequence: Synthetic polypeptide
QVQLQESGGGLVVAGGSLRLSCAASGSSVSFLSIAWYRQAPGKKRELVAGISTDGTTNYVDSVKDRFTISRDNAKNTVYLQMNSLQPEDTAAYYCYAYRWVGRDTYWGQGTQVTVSS

SEQ ID NO: 333 - protein, 117 aa, Artificial Sequence
  Description of Artificial Sequence: Synthetic polypeptide
QVQLQESGGGLVQAGGSLTLSCAASGSSVSFLSMAWYRQAPGKKRELVAGISTDGTTNYVDSVKDRFTISRDNAKNTVYLQMNSLQPEDTAAYYCYAYRWVGRDTYWGQGTQVTVSS

SEQ ID NO: 334 - protein, 117 aa, Artificial Sequence
  Description of Artificial Sequence: Synthetic polypeptide
QVQLQESGGGLVQAGGSLRLSCAASGSSVSFLSMAWYRQAPGKKRELVAGISTDGSTNYADSVKGRFTISEGNAKNTVDLQMNSLQPEDTAVYYCYAYRWVDRYTYWGQGTQVTVSS

SEQ ID NO: 335 - protein, 117 aa, Artificial Sequence
  Description of Artificial Sequence: Synthetic polypeptide
QVQLQESGGGLVVAGGSLRLSCAASGSSVSFLSMAWYRQAPGKKRELVAGISTDGSTNYADSVKGRFTISEDNAKNTVDLQMNSLQPEDTAVYYCYAYRWIDRYTYWGQGTQVTVSS

SEQ ID NO: 336 - protein, 117 aa, Artificial Sequence
  Description of Artificial Sequence: Synthetic polypeptide
QVQLQESGGGLVQPGGSLRLSCAASGSSVSFLSMAWYRQAPGKKRELVAGISTDGSTNYADSVKGRFTISEDNAKNTVDLQMNSLQPEDTAVYYCYAYRWVDRYTYWGQGTQVTVSS

SEQ ID NO: 337 - protein, 117 aa, Artificial Sequence
  Description of Artificial Sequence: Synthetic polypeptide
QVQLQESGGGLVVAGGSLRLSCAASGSSVSFLSMAWYRQAPGKKRELVAGISSDGSTNYVDSVKGRFTISRDNAKNIVFLQMNSLQPQDTAVYYCYAYRWVGRDTYWGQGTQVTVSS

SEQ ID NO: 338 - protein, 117 aa, Artificial Sequence
  Description of Artificial Sequence: Synthetic polypeptide
QVQLQESGGGLVVAGGSLRLSCAASGSSVSFLSMAWYRQAPGKKRELVAGISADGSTDYIDSVKGRFTISRDSANNTMYLQMNSLQPEDTAVYYCYAYRWTTRYTYWGQGTQVTVSS

SEQ ID NO: 339 - protein, 117 aa, Artificial Sequence
  Description of Artificial Sequence: Synthetic polypeptide
QVQLQESGGGLVQPGGSLRLSCAASGFTLDYYAIGWYRQAPGKKRELVAGISSDGSTHYVDSVKGRFAISRDNAENTVYLQMNDLQPDDTAVYYCYAYRWVGGYTYWGQGTQVTVSS

SEQ ID NO: 340 - protein, 119 aa, Artificial Sequence
  Description of Artificial Sequence: Synthetic polypeptide
QVQLQESGGGLVQAGGSLRLSCVASGSTSSINAMGWYRRAPGKQRELVAGISSDGSKNYADSVKGRFTISRDNAKNTVYLQMNSLKPEDTAVYYCYYFRTVAASSMQYWGQGTQVTVSS

SEQ ID NO: 341 - protein, 119 aa, Artificial Sequence
  Description of Artificial Sequence: Synthetic polypeptide
QVQLQESGGGLVQAGGSLRLSCVASGSTSSINAMGWYRRAPGKQRELVAGISSDGSKVYADSVKGRFTISRDNAKNTVYLQMNSLKPEDTAVFYCYYFRTVSGSSMRYWGQGTQVTVSS

SEQ ID NO: 342 - protein, 118 aa, Artificial Sequence
  Description of Artificial Sequence: Synthetic polypeptide
QVQLQESGGGLVQAGGSLRLSCAASGITSSVYSMGWYRQAPGKQRELVAGSSSDGSTHYVDSVRGRFTISRDNAKNTVYLQMSSLKPEDTAVYYCYANRGFAGAPSYWGQGTQVTVSS

SEQ ID NO: 343 - protein, 114 aa, Artificial Sequence
  Description of Artificial Sequence: Synthetic polypeptide
QVQLQESGGGLVQAGGSLRLSCAASGRTSMFNSMGWHRQAPGKQRELVAIIRSGGSSNYADTVKGRFTISRDNTKNTVYLQMNDLKPEDTAVYYCFYYFQSSYWGQGTQVTVSS

SEQ ID NO: 344 - protein, 114 aa, Artificial Sequence
  Description of Artificial Sequence: Synthetic polypeptide
QVQLQESGGGLVQAGGSLRLSCAASGRTSMVNSMGWHRQAPGKQRELVALITSGGSSNYADTVKGRFTISRDNTKNTVYLQMNDLKPEDTAVYYCFYYFQSSYWGQGTQVTVSS

SEQ ID NO: 345 - protein, 119 aa, Artificial Sequence
  Description of Artificial Sequence: Synthetic polypeptide
QVQLQESGGGLVQAGGSLRLSCTASGSIFSIAVMGWYRQVPGKRREWVATIFDGSYTNYADSVKGRFTISRDNARNKVYLQMNNLKPEDTAVYYCQTHWTQGSVPKESWGQGTQVTVSS

SEQ ID NO: 346 - protein, 115 aa, Artificial Sequence
  Description of Artificial Sequence: Synthetic polypeptide
QVQLQESGGGLVQAGGSLRLSCVASSGIFSDMSMVWYRQAPGKQRELVASITTFGSTNYADPVKGRFTISRDNAKNTVYLQMNSLKPEDTAVYYCSGRSYSSDYWGRGTQVTVSS

SEQ ID NO: 347 - protein, 115 aa, Artificial Sequence
  Description of Artificial Sequence: Synthetic polypeptide
QVQLQESGGGLVQAGGSLRLSCVASGSISSIIVMGWSRQAPGKQRESVATITRDGTRNYADSLKGRFTISRDNAKNTSYLQINSLKPEDTAVYSCYARYGDINYWGKGTQVTVSS

SEQ ID NO: 348 - protein, 115 aa, Artificial Sequence
  Description of Artificial Sequence: Synthetic polypeptide
QVQLQESGGGLVQAGGSLRLSCVASGSISSIIVMGWSRQAPGKQRESLATISRGGTRTYADSVKGRFTISRDNAKNTSYLQMNSLKPEDTAVYSCYARYGDINYWGKGTQVTVSS

SEQ ID NO: 349 - protein, 114 aa, Artificial Sequence
  Description of Artificial Sequence: Synthetic polypeptide
QVQLQESGGGLVQAGGSLRLSCVASGSIFTTNSMGWHRQGPGKQRELVALIGSAGSTKYADSVKGRFTISRDNAKNTVSLQMDSLKPEDTAVYYCFYYDSRSYWGQGTQVTVSS

SEQ ID NO: 350 - protein, 114 aa, Artificial Sequence
  Description of Artificial Sequence: Synthetic polypeptide
QVQLQESGGGMVQPGGSLRLSCAASGSREISTMGWHRQAPGKQRELAARITSGGITKYADSVKGRFTISRDNAKKTVYLQMNSLKSEDTAVYYCFAYDNINAYWGQGTQVTVSS

SEQ ID NO: 351 - protein, 114 aa, Artificial Sequence
  Description of Artificial Sequence: Synthetic polypeptide
QVQLQESGGGWVQAGGSLRLSCAASGSREISTMGWHRQAPGKQRELAARITSGGITKYADSVKGRFTISRDNAKKTVYLQMNSLKSEDTAVYYCFAYDNINAYWGQGTQVTVSS

SEQ ID NO: 352 - protein, 114 aa, Artificial Sequence
  Description of Artificial Sequence: Synthetic polypeptide
QVQLQESGGGWVQAGGSLRLSCTASGSREISTMGWHRQAPGKQRELAARITSGGITKYADSVKGRFTISRDNAKKTVYLQMDSLKSEDTAVYYCFAYDNINAYWGQGTQVTVSS

SEQ ID NO: 353 - protein, 114 aa, Artificial Sequence
  Description of Artificial Sequence: Synthetic polypeptide
QVQLQESGGGSVQAGRSLGLSCAASGSREISTMGWHRQAPGKQRELAARITSGGITKYADSVKGRFTISRDNAKKTVYLQMNSLKSEDTAVYYCFAYDNINAYWGQGTQVTVSS

SEQ ID NO: 354 - protein, 115 aa, Artificial Sequence
  Description of Artificial Sequence: Synthetic polypeptide
QVQLQESGGGLVQAGGSLRLSCTASGSIFRGAAMYWHRQAPGKQRELVAAITTSGNTSYADSVKGRFTISRDNAKNTMYLQIISLKPEDTAVYYCAFWIAGKAYWGQGTQVTVSS

SEQ ID NO: 355 - protein, 115 aa, Artificial Sequence
  Description of Artificial Sequence: Synthetic polypeptide
QVQLQESGGGLVQPGGSLRLSCAASGSISSFNFMSWHRQAPGKERELAGVITRGGATNYADSVKGRFTISRDNVKNTVYLQMNGLKPEDTAVYYCHGRSQLGSTWGQGTQVTVSS

SEQ ID NO: 356 - protein, 116 aa, Artificial Sequence
  Description of Artificial Sequence: Synthetic polypeptide
QVQLQESGGGLVQAGGSLRLSCLASGTIFTASTMGWHRQPPGKQRELVASIAGDGRTNYAESTEGRFTISRDDAKNTMYLQMNSLKPEDTAVYYCYAYYLDTYAYWGQGTQVTVSS

SEQ ID NO: 357 - protein, 115 aa, Artificial Sequence
  Description of Artificial Sequence: Synthetic polypeptide
EVQLVESGGGLVQPGGSLTLSCAASGSIFSIASMGWYRQAPGKQRELVAVITSFSSTNYADSVKGRFTISRDNAKNSVYLQMNSLRAEDTAVYYCNARYFERTDWGQGTLVTVSS

SEQ ID NO: 358 - protein, 114 aa, Artificial Sequence
  Description of Artificial Sequence: Synthetic polypeptide
EVQLVESGGGLVQPGGSLTLSCAASGRTSMFNSMGWHRQAPGKQRELVAIIRSGGSSNYADTVKGRFTISRDNAKNSVYLQMNSLRAEDTAVYYCFYYFQSSYWGQGTLVTVSS

SEQ ID NO: 359 - protein, 117 aa, Artificial Sequence
  Description of Artificial Sequence: Synthetic polypeptide
EVQLVESGGGLVQPGGSLTLSCAASGSSVSFLSMAWYRQAPGKKRELVAGISVDGSTNYADSVKGRFTISRDNAKNSVYLQMNSLRAEDTAVYYCYAYRWVGRDTYWGQGTLVTVSS

SEQ ID NO: 360 - protein, 115 aa, Artificial Sequence
  Description of Artificial Sequence: Synthetic polypeptide
EVQLVESGGGLVQPGGSLTLSCTASGSIFRGAAMYWHRQAPGKQRELVAAITTSGNTSYADSVKGRFTISRDNAKNSMYLQMNSLRAEDTAVYYCAFWIAGKAYWGQGTLVTVSS

SEQ ID NO: 361 - protein, 116 aa, Artificial Sequence
  Description of Artificial Sequence: Synthetic polypeptide
EVQLVESGGGLVQPGGSLTLSCAASGSTFNIKTMAWHRQAPGNQRELVATLTSGGNTNYADSVKGRFTISRDNAKNSVYLQMNSLRAEDTAVYYCGLWNGVGGAYWGQGTLVTVSS

SEQ ID NO: 362 - protein, 116 aa, Artificial Sequence
  Description of Artificial Sequence: Synthetic polypeptide
EVQLVESGGGLVQPGGSLTLSCAASGSTLNIKIMAWHRQAPGKQRELVATLTSGGNTNYADSVKGRFTISRDNAKNSVYLQMNSLRAEDTAVYYCGLWDGVGGAYWGQGTLVTVSS

SEQ ID NO: 363 - protein, 115 aa, Artificial Sequence
  Description of Artificial Sequence: Synthetic polypeptide
EVQLVESGGGLVQPGGSLTLSCAASSSIFSISSMSWYRQAPGKQRELVAAITTFDYTNYADSVKGRFTISRDNAKNSMYLQMNSLRAEDTAVYYCNARAFGRDYWGQGTLVTVSS

SEQ ID NO: 364 - protein, 119 aa, Artificial Sequence
  Description of Artificial Sequence: Synthetic polypeptide
EVQLVESGGGLVQPGGSLTLSCVASGSTSSINAMGWYRRAPGKQRELVAGISSDGSKNYADSVKGRFTISRDNAKNSVYLQMNSLRAEDTAVYYCYYFRTVAASSMQYWGQGTLVTVSS

SEQ ID NO: 365 - protein, 114 aa, Artificial Sequence
  Description of Artificial Sequence: Synthetic polypeptide
EVQLVESGGGLVQPGGSLTLSCAASGFMFSSYSMSWYRQAPGKQRELVAAITSYGSTNYADSVKGRFTISRDNAKNSVYLQMNSLRAEDTAVYYCNARSWNNYWGQGTLVTVSS

SEQ ID NO: 366 - protein, 114 aa, Artificial Sequence
  Description of Artificial Sequence: Synthetic polypeptide
EVQLVESGGGLVQPGGSLTLSCAASGSVSMFNSMGWHRQPPGKQRELVAIITSGGSSNYADTVKGRFTISRDNAKNSVYLQMNSLRAEDTAVYYCFYYFQSSYWGQGTLVTVSS

SEQ ID NO: 367 - protein, 116 aa, Artificial Sequence
  Description of Artificial Sequence: Synthetic polypeptide
EVQLVESGGGLVQPGGSLTLSCTASGGRFSYATMGWSRQAPGKQREMVARITSSGFSTNYADSVKGRFTISRDNAKNSVYLQMNSLRAEDTAVYYCNAQHFGTDSWGQGTLVTVSS

SEQ ID NO: 368 - protein, 115 aa, Artificial Sequence
  Description of Artificial Sequence: Synthetic polypeptide
EVQLVESGGGLVQPGGSLTLSCAASGSISSFNFMSWHRQAPGKERELAGVITRGGATNYADSVKGRFTISRDNAKNSVYLQMNSLRAEDTAVYYCHGRSQLGSTWGQGTLVTVSS

SEQ ID NO: 369 - protein, 115 aa, Artificial Sequence
  Description of Artificial Sequence: Synthetic polypeptide
EVQLVESGGGLVQPGGSLTLSCAASESIFSINVMAWHRQAPGKQRELVARITSGGSTNYADSVKGRFTISRDNAKNSVYLQMNSLRAEDTAVYYCGAYQGLYAYWGQGTLVTVSS

SEQ ID NO: 370 - protein, 114 aa, Artificial Sequence
  Description of Artificial Sequence: Synthetic polypeptide
EVQLVESGGGLVQPGGSLTLSCAASGSREISTMGWHRQAPGKQRELAARITSGGITKYADSVKGRFTISRDNAKNSVYLQMNSLRAEDTAVYYCFAYDNINAYWGQGTLVTVSS

SEQ ID NO: 371 - protein, 119 aa, Artificial Sequence
  Description of Artificial Sequence: Synthetic polypeptide
EVQLVESGGGLVQPGGSLTLSCTASGSIFSIAVMGWYRQVPGKRREWVATIFDGSYTNYADSVKGRFTISRDNAKNSVYLQMNSLRAEDTAVYYCQTHWTQGSVPKESWGQGTLVTVSS

SEQ ID NO: 372 - protein, 119 aa, Artificial Sequence
  Description of Artificial Sequence: Synthetic polypeptide
EVQLVESGGGLVQPGGSLTLSCVASGSTSSINAMGWYRRAPGKQRELVAGISSDGSKVYADSVKGRFTISRDNAKNSVYLQMNSLRAEDTAVYYCYYFRTVSGSSMRYWGQGTLVTVSS

SEQ ID NO: 373 - protein, 115 aa, Artificial Sequence
  Description of Artificial Sequence: Synthetic polypeptide
EVQLVESGGGLVQPGGSLTLSCVASSGIFSDMSMVWYRQAPGKQRELVASITTFGSTNYADPVKGRFTISRDNAKNSVYLQMNSLRAEDTAVYYCSGRSYSSDYWGQGTLVTVSS

SEQ ID NO: 374 - protein, 114 aa, Artificial Sequence
  Description of Artificial Sequence: Synthetic polypeptide
EVQLVESGGGLVQPGGSLTLSCAASGFMFSSYSMSWYRQAPGKQRELVAAITTWGSTNYADSVKGRFTISRDNAKNSVYLQMNSLRAEDTAVYYCNARSWNNYWGQGTLVTVSS

SEQ ID NO: 375 - protein, 116 aa, Artificial Sequence
  Description of Artificial Sequence: Synthetic polypeptide
EVQLVESGGGLVQPGGSLTLSCTASGSRFSYATMGWSRQAPGKQRELVARITSSGFSTNYADSVKGRFTISRDNAKNSVYLQMNSLRAEDTAVYYCNAQQFGTDSWGQGTLVTVSS

SEQ ID NO: 376 - protein, 117 aa, Artificial Sequence
  Description of Artificial Sequence: Synthetic polypeptide
EVQLVESGGGLVQPGGSLTLSCAASGSTFTSNVMGWHRQAPGKQRELVANMHSGGSTNYADSVKGRFTISRDNAKNSVYLQMNSLRAEDTAVYYCRWYGIQRAEGYWGQGTLVTVSS

SEQ ID NO: 377 - protein, 117 aa, Artificial Sequence
  Description of Artificial Sequence: Synthetic polypeptide
EVQLVESGGGLVQPGGSLTLSCAASGSSVSFLSMAWYRQAPGKKRELVAGISTDGSTNYVDSVKGRFTISRDNAKNSVYLQMNSLRAEDTAVYYCYAYRWVGRYTYWGQGTLVTVSS

SEQ ID NO: 378 - protein, 115 aa, Artificial Sequence
  Description of Artificial Sequence: Synthetic polypeptide
EVQLVESGGGLVQPGGSLTLSCVASGSISSIIVMGWSRQAPGKQRESVATITRDGTRNYADSLKGRFTISRDNAKNSSYLQMNSLRAEDTAVYYCYARYGDINYWGQGTLVTVSS

SEQ ID NO: 379 - protein, 117 aa, Artificial Sequence
  Description of Artificial Sequence: Synthetic polypeptide
EVQLVESGGGLVQPGGSLTLSCAASGSSVSFLSMAWYRQAPGKKRELVAGISADGSTDYIDSVKGRFTISRDNAKNSVYLQMNSLRAEDTAVYYCYAYRWTTRYTYWGQGTLVTVSS

SEQ ID NO: 380 - protein, 116 aa, Artificial Sequence
  Description of Artificial Sequence: Synthetic polypeptide
EVQLVESGGGLVQPGGSLTLSCLASGTIFTASTMGWHRQPPGKQRELVASIAGDGRTNYAESTEGRFTISRDNAKNSMYLQMNSLRAEDTAVYYCYAYYLDTYAYWGQGTLVTVSS

SEQ ID NO: 381 - protein, 117 aa, Artificial Sequence
  Description of Artificial Sequence: Synthetic polypeptide
EVQLVESGGGLVQPGGSLTLSCAASGSSVSFLSMAWYRQAPGKKRELVAGISVDGSTNYADSVKGRFTISRDNAKNSVYLQMNSLRAEDTAVYYCYAYRWEGRNTYWGQGTLVTVSS

SEQ ID NO: 382 - protein, 117 aa, Artificial Sequence
  Description of Artificial Sequence: Synthetic polypeptide
EVQLVESGGGLVQPGGSLTLSCVASGSSFSHNTMGWYRQAPGKQRDLVARITTFGTTNYADSVKGRFTISRDNAKNSVYLQMNSLRAEDTAVYYCNGESFGRIWYNWGQGTLVTVSS

SEQ ID NO: 383 - protein, 115 aa, Artificial Sequence
  Description of Artificial Sequence: Synthetic polypeptide
EVQLVESGGGLVQPGGSLTLSCVASGSISSIIVMGWSRQAPGKQRESLATISRGGTRTYADSVKGRFTISRDNAKNSSYLQMNSLRAEDTAVYYCYARYGDINYWGQGTLVTVSS

SEQ ID NO: 384 - protein, 115 aa, Artificial Sequence
  Description of Artificial Sequence: Synthetic polypeptide
EVQLVESGGGLVQPGGSLTLSCVASGSSFSITSMAWYRQAPGKQRDLVAAITSFGSTNYADSVKDRFTISRDNAKNSVYLQMNSLRAEDTAVYYCNGRVFDHVYWGQGTLVTVSS

SEQ ID NO: 385 - protein, 114 aa, Artificial Sequence
  Description of Artificial Sequence: Synthetic polypeptide
EVQLVESGGGLVQPGGSLTLSCAASGRTSMVNSMGWHRQAPGKQRELVALITSGGSSNYADTVKGRFTISRDNAKNSVYLQMNSLRAEDTAVYYCFYYFQSSYWGQGTLVTVSS

SEQ ID NO: 386 - protein, 116 aa, Artificial Sequence
  Description of Artificial Sequence: Synthetic polypeptide
EVQLVESGGGLVQPGGSLTLSCAASGSTFNFKIMAWHRQAPGKQRELVASLTSEGLTNYRDSVKGRFTISRDNAKNSVYLQMNSLRAEDTAVYYCGLWDGVGGAYWGQGTLVTVSS

SEQ ID NO: 387 - protein, 117 aa, Artificial Sequence
  Description of Artificial Sequence: Synthetic polypeptide
EVQLVESGGGLVQPGGSLTLSCAASGFTLDYYAIGWYRQAPGKKRELVAGISSDGSTHYVDSVKGRFTISRDNAKNSVYLQMNSLRAEDTAVYYCYAYRWVGGYTYWGQGTLVTVSS

SEQ ID NO: 388 - protein, 114 aa, Artificial Sequence
  Description of Artificial Sequence: Synthetic polypeptide
EVQLVESGGGLVQPGGSLTLSCVASGSIFTTNSMGWHRQGPGKQRELVALIGSAGSTKYADSVKGRFTISRDNAKNSVYLQMNSLRAEDTAVYYCFYYDSRSYWGQGTLVTVSS

SEQ ID NO: 389 - protein, 118 aa, Artificial Sequence
  Description of Artificial Sequence: Synthetic polypeptide
EVQLVESGGGLVQPGGSLTLSCAASGITSSVYSMGWYRQAPGKQRELVAGSSSDGSTHYVDSVRGRFTISRDNAKNSVYLQMNSLRAEDTAVYYCYANRGFAGAPSYWGQGTLVTVSS

SEQ ID NO: 390 - protein, 115 aa, Artificial Sequence
  Description of Artificial Sequence: Synthetic polypeptide
EVQLVESGGGLVQPGGSLTLSCAASSSIFSISSMSWYRQAPGKQRELVAAITSFGSTNYADSVKGRFTISRDNAKNSMYLQMNSLRAEDTAVYYCNARTMGRDYWGQGTLVTVSS

SEQ ID NO: 391 - protein, 119 aa, Artificial Sequence
  Description of Artificial Sequence: Synthetic polypeptide
EVQLVESGGGLVQPGGSLTLSCVASGFTSSINAMGWYRRAPGKQRELVAGISSDGSFVYADSVKGRFTISRDNAKNSVYLQMNSLRAEDTAVYYCYYFRHVSGSSMRYWGQGTLVTVSS

SEQ ID NO: 392 - protein, 119 aa, Artificial Sequence
  Description of Artificial Sequence: Synthetic polypeptide
EVQLVESGGGLVQPGGSLTLSCVASGSTSSINAMAWYRRAPGKQRELVAGISSDGSKVYADSVKGRFTISRDNAKNSVYLQMNSLRAEDTAVYYCYYFRTVSGSSSRYWGQGTLVTVSS

SEQ ID NO: 393 - protein, 119 aa, Artificial Sequence
  Description of Artificial Sequence: Synthetic polypeptide
EVQLVESGGGLVQPGGSLTLSCVASGSTSSINAMGWYRRAPGKQRELVAGISSDGSKVYEDSVKGRFTISRDNAKNSVYLQMNSLRAEDTAVYYCYYFRTVSGSSMRYWGQGTLVTVSS

SEQ ID NO: 394 - protein, 119 aa, Artificial Sequence
  Description of Artificial Sequence: Synthetic polypeptide
EVQLVESGGGLVQPGGSLTLSCVASGSPSSINAMGWYRRAPGKQRELSAGISSDGSKVYADSVKGRFTISRDNAKNSVYLQMNSLRAEDTAVYYCYYFRTVRGSSMSYWGQGTLVTVSS

SEQ ID NO: 395 - protein, 119 aa, Artificial Sequence
  Description of Artificial Sequence: Synthetic polypeptide
EVQLVESGGGLVQPGGSLTLSCVASGSTSSINAMGWYRRAPGKQRELAAGISSDGSSVYADSVKGRFTISRDNAKNSVYLQMNSLRAEDTAVYYCYYFRTVSGSSKRYWGQGTLVTVSS

SEQ ID NO: 396 - protein, 119 aa, Artificial Sequence
  Description of Artificial Sequence: Synthetic polypeptide
EVQLVESGGGLVQPGGSLTLSCVASGSISSINAMGWYRRAPGKQRELVAGISSDGSKVYADSVKGRFTISRDNAKNSVYLQMNSLRAEDTAVYYCYYFRMVSGSSMRYWGQGTLVTVSS

SEQ ID NO: 397 - protein, 119 aa, Artificial Sequence
  Description of Artificial Sequence: Synthetic polypeptide
EVQLVESGGGLVQPGGSLTLSCVASGSTSSINAMAWYRRAPGKQRELVAGISSDGSKLYADSVKGRFTISRDNAKNSVYLQMNSLRAEDTAVYYCYYFRTVQGSSMRYWGQGTLVTVSS

SEQ ID NO: 398 - protein, 119 aa, Artificial Sequence
  Description of Artificial Sequence: Synthetic polypeptide
EVQLVESGGGLVQPGGSLTLSCVASGSTSSINAYGWYRRAPGKQRELVAGISSDGSKVYADSVKGRFTISRDNAKNSVYLQMNSLRAEDTAVYYCYYFRTVYGSSMRYWGQGTLVTVSS

SEQ ID NO: 399 - protein, 119 aa, Artificial Sequence
  Description of Artificial Sequence: Synthetic polypeptide
EVQLVESGGGLVQPGGSLTLSCVASGSTSSINAIGWYRRAPGKQRELVAGISSDGSKVYIDSVKGRFTISRDNAKNSVYLQMNSLRAEDTAVYYCYYFRTVSGSSYRYWGQGTLVTVSS

SEQ ID NO: 400 - protein, 119 aa, Artificial Sequence
  Description of Artificial Sequence: Synthetic polypeptide
EVQLVESGGGLVQPGGSLTLSCVASGSTSSINAMAWYRRAPGKQRELVAGISSDGSKVYSDSVKGRFTISRDNAKNSVYLQMNSLRAEDTAVYYCYYFRTVLGSSMRYWGQGTLVTVSS

SEQ ID NO: 401 - protein, 119 aa, Artificial Sequence
  Description of Artificial Sequence: Synthetic polypeptide
EVQLVESGGGLVQPGGSLTLSCVASGSTSIINAMGWYRRAPGKQRELAAGISSDGSKVIADSVKGRFTISRDNAKNSVYLQMNSLRAEDTAVYYCYYFRRVSGSSMRYWGQGTLVTVSS

SEQ ID NO: 402 - protein, 119 aa, Artificial Sequence
  Description of Artificial Sequence: Synthetic polypeptide
EVQLVESGGGLVQPGGSLTLSCVASGSTSSINAMGWYRRAPGKQRELVAGISSDGSKIYADSVKGRFTISRDNAKNSVYLQMNSLRAEDTAVYYCYYFRTVSGSSMRYWGQGTLVTVSS

SEQ ID NO: 403 - protein, 119 aa, Artificial Sequence
  Description of Artificial Sequence: Synthetic polypeptide
EVQLVESGGGLVQPGGSLTLSCVASGKTSSINAMAWYRRAPGKQRELVAGISSDGSKVYTDSVKGRFTISRDNAKNSVYLQMNSLRAEDTAVYYCYYFRTVSGSSARYWGQGTLVTVSS

SEQ ID NO: 404 - protein, 119 aa, Artificial Sequence
  Description of Artificial Sequence: Synthetic polypeptide
EVQLVESGGGLVQPGGSLTLSCVASGTTSSINAMGWYRRAPGKQRELVAGISSDGSLVYADSVKGRFTISRDNAKNSVYLQMNSLRAEDTAVYYCYYFRIVRGSSMRYWGQGTLVTVSS

SEQ ID NO: 405 - protein, 119 aa, Artificial Sequence
  Description of Artificial Sequence: Synthetic polypeptide
EVQLVESGGGLVQPGGSLTLSCVASGSTSSINAMAWYRRAPGKQRELVAGISSDGSKVYADSVKGRFTISRDNAKNSVYLQMNSLRAEDTAVYYCYYYRTVSGSSMRYWGQGTLVTVSS

SEQ ID NO: 406 - protein, 119 aa, Artificial Sequence
  Description of Artificial Sequence: Synthetic polypeptide
EVQLVESGGGLVQPGGSLTLSCVASGSGSSINAMGWYRRAPGKQRELVAGISSDGSKVYSDSVKGRFTISRDNAKNSVYLQMNSLRAEDTAVYYCYYFRHVSGSSMRYWGQGTLVTVSS

SEQ ID NO: 407 - protein, 119 aa, Artificial Sequence
  Description of Artificial Sequence: Synthetic polypeptide
EVQLVESGGGLVQPGGSLTLSCVASGTTSSINAMGWYRRAPGKQRELVAGISSDGSKVYVDSVKGRFTISRDNAKNSVYLQMNSLRAEDTAVYYCYYFRFVSGSSMRYWGQGTLVTVSS

SEQ ID NO: 408 - protein, 119 aa, Artificial Sequence
  Description of Artificial Sequence: Synthetic polypeptide
EVQLVESGGGLVQPGGSLTLSCVASGSTSSINAMAWYRRAPGKQRELVAGISSDGSKVYVDSVKGRFTISRDNAKNSVYLQMNSLRAEDTAVYYCYYFRTVSGSSMRYWGQGTLVTVSS

SEQ ID NO: 409 - protein, 119 aa, Artificial Sequence
  Description of Artificial Sequence: Synthetic polypeptide
EVQLVESGGGLVQPGGSLTLSCVASGSTSRINAMGWYRRAPGKQRELVAGISSDGSKVYADSVKGRFTISRDNAKNSVYLQMNSLRAEDTAVYYCYYFRTKSGSSMRYWGQGTLVTVSS

SEQ ID NO: 410 - protein, 119 aa, Artificial Sequence
  Description of Artificial Sequence: Synthetic polypeptide
EVQLVESGGGLVQPGGSLTLSCVASGSTSRINAMGWYRRAPGKQRELVAGISSDGSKVYADSVKGRFTISRDNAKNSVYLQMNSLRAEDTAVYYCYYFRTVYGSSMRYWGQGTLVTVSS

SEQ ID NO: 411 - protein, 119 aa, Artificial Sequence
  Description of Artificial Sequence: Synthetic polypeptide
EVQLVESGGGLVQPGGSLTLSCVASGSTSSINAMGWYRRAPGKQRELVAGISSDGSKVYRDSVKGRFTISRDNAKNSVYLQMNSLRAEDTAVYYCYYFRTVSGSSMGYWGQGTLVTVSS

SEQ ID NO: 412 - protein, 119 aa, Artificial Sequence
  Description of Artificial Sequence: Synthetic polypeptide
EVQLVESGGGLVQPGGSLTLSCVASGSTSSINAMAWYRRAPGKQRELVAGISSDGSKVYSDSVKGRFTISRDNAKNSVYLQMNSLRAEDTAVYYCYYFRTVSGSSMRSWGQGTLVTVSS

SEQ ID NO: 413 - protein, 119 aa, Artificial Sequence
  Description of Artificial Sequence: Synthetic polypeptide
EVQLVESGGGLVQPGGSLTLSCVASGSTSSINAMAWYRRAPGKQRELVAGISSDNSKVYADSVKGRFTISRDNAKNSVYLQMNSLRAEDTAVYYCYYFRTVGGSSMRYWGQGTLVTVSS

SEQ ID NO: 414 - protein, 119 aa, Artificial Sequence
  Description of Artificial Sequence: Synthetic polypeptide
EVQLVESGGGLVQPGGSLTLSCVASGNTSSINAMAWYRRAPGKQRELVAGISSDGSKVYADSVKGRFTISRDNAKNSVYLQMNSLRAEDTAVYYCYYFRTVSGSSMRYWGQGTLVTVSS

SEQ ID NO: 415 - protein, 119 aa, Artificial Sequence
  Description of Artificial Sequence: Synthetic polypeptide
EVQLVESGGGLVQPGGSLTLSCVASGSTSSINAMAWYRRAPGKQRELVAGISSDGSKVYADSVKGRFTISRDNAKNSVYLQMNSLRAEDTAVYYCYYFRTVSGSHMRYWGQGTLVTVSS

SEQ ID NO: 416 - protein, 119 aa, Artificial Sequence
  Description of Artificial Sequence: Synthetic polypeptide
EVQLVESGGGLVQPGGSLTLSCVASGSTSIINAMGWYRRAPGKQRELVAGISSDGSKVYEDSVKGRFTISRDNAKNSVYLQMNSLRAEDTAVYYCYYFRAVSGSSMRYWGQGTLVTVSS

SEQ ID NO: 417 - protein, 119 aa, Artificial Sequence
  Description of Artificial Sequence: Synthetic polypeptide
EVQLVESGGGLVQPGGSLTLSCVASGSTSSINAMAWYRRAPGKQRELVAGISSDGSKVYADSVKGRFTISRDNAKNSVYLQMNSLRAEDTAVYYCYYFRTVSGSSMRYWGQGTLVTVSS

SEQ ID NO: 418 - protein, 119 aa, Artificial Sequence
  Description of Artificial Sequence: Synthetic polypeptide
EVQLVESGGGLVQPGGSLTLSCVASGSTSRINAMGWYRRAPGKQRELPAGISSDGSKVYAVSVKGRFTISRDNAKNSVYLQMNSLRAEDTAVYYCYYFRTVSGSPMRYWGQGTLVTVSS

SEQ ID NO: 419 - protein, 119 aa, Artificial Sequence
  Description of Artificial Sequence: Synthetic polypeptide
EVQLVESGGGLVQPGGSLTLSCVASGSTSRINAMGWYRRAPGKQRELVAGVSSDGSKVYADSVKGRFTISRDNAKNSVYLQMNSLRAEDTAVYYCYYFRTVSGSSMSYWGQGTLVTVSS

SEQ ID NO: 420 - protein, 119 aa, Artificial Sequence
  Description of Artificial Sequence: Synthetic polypeptide
EVQLVESGGGLVQPGGSLTLSCVASGTTSSINAMGWYRRAPGKQRELVAGISSDGSKVYEDSVKGRFTISRDNAKNSVYLQMNSLRAEDTAVYYCYYFRTVSGSSMRYWGQGTLVTVSS

SEQ ID NO: 421 - protein, 119 aa, Artificial Sequence
  Description of Artificial Sequence: Synthetic polypeptide
EVQLVESGGGLVQPGGSLTLSCVASGITSSINAMGWYRRAPGKQRELVAGISSDGSKVYAGSVKGRFTISRDNAKNSVYLQMNSLRAEDTAVYYCYYFRTVRGSSMRYWGQGTLVTVSS

SEQ ID NO: 422 - protein, 119 aa, Artificial Sequence
  Description of Artificial Sequence: Synthetic polypeptide
EVQLVESGGGLVQPGGSLTLSCVASGSTSDINAMGWYRRAPGKQRELVAGISSDKSKVYADSVKGRFTISRDNAKNSVYLQMNSLRAEDTAVYYCYYFRTVRGSSMRYWGQGTLVTVSS

SEQ ID NO: 423 - protein, 119 aa, Artificial Sequence
  Description of Artificial Sequence: Synthetic polypeptide
EVQLVESGGGLVQPGGSLTLSCVASGSTSSINAMAWYRRAPGKQRELVAGISSNGSKVYADSVKGRFTISRDNAKNSVYLQMNSLRAEDTAVYYCYYFRQVSGSSMRYWGQGTLVTVSS

SEQ ID NO: 424 - protein, 119 aa, Artificial Sequence
  Description of Artificial Sequence: Synthetic polypeptide
EVQLVESGGGLVQPGGSLTLSCVASGSTSSINAIGWYRRAPGKQRELVAGISSDGSKVLADSVKGRFTISRDNAKNSVYLQMNSLRAEDTAVYYCYYFRIVSGSSMGYWGQGTLVTVSS

SEQ ID NO: 425 - protein, 119 aa, Artificial Sequence
  Description of Artificial Sequence: Synthetic polypeptide
EVQLVESGGGLVQPGGSLTLSCVASGSTSSKNAMGWYRRAPGKQRELVAGISSDGSKVYADSVKGRFTISRDNAKNSVYLQMNSLRAEDTAVYYCYYFRTVSGASMRYWGQGTLVTVSS

SEQ ID NO: 426 - protein, 119 aa, Artificial Sequence
  Description of Artificial Sequence: Synthetic polypeptide
EVQLVESGGGLVQPGGSLTLSCVASGSTSSINAMGWYRRAPGKQRELVAGISSDNSKVYADSVKGRFTISRDNAKNSVYLQMNSLRAEDTAVYYCYYFRTVHGSSMRYWGQGTLVTVSS

SEQ ID NO: 427 - protein, 119 aa, Artificial Sequence
  Description of Artificial Sequence: Synthetic polypeptide
EVQLVESGGGLVQPGGSLTLSCVASGLTSSINAMGWYRRAPGKQRELVAGISSDGSKVYADSVKGRFTISRDNAKNSVYLQMNSLRAEDTAVYYCYYFRMVSGSSMRYWGQGTLVTVSS

SEQ ID NO: 428 - protein, 119 aa, Artificial Sequence
  Description of Artificial Sequence: Synthetic polypeptide
EVQLVESGGGLVQPGGSLTLSCVASGSTSSINAMAWYRRAPGKQRELVAGISSDGSKVYTDSVKGRFTISRDNAKNSVYLQMNSLRAEDTAVYYCYYFRTISGSSMRYWGQGTLVTVSS

SEQ ID NO: 429 - protein, 119 aa, Artificial Sequence
  Description of Artificial Sequence: Synthetic polypeptide
EVQLVESGGGLVQPGGSLTLSCVASGSTSSNNAMAWYRRAPGKQRELVAGISSDGSKVYTDSVKGRFTISRDNAKNSVYLQMNSLRAEDTAVYYCYYFRTRSGSSMRYWGQGTLVTVSS

SEQ ID NO: 430 - protein, 119 aa, Artificial Sequence
  Description of Artificial Sequence: Synthetic polypeptide
EVQLVESGGGLVQPGGSLTLSCVASGSTSSINAMAWYRRAPGKQRELVAGISSDNSKVYADSVKGRFTISRDNAKNSVYLQMNSLRAEDTAVYYCYYFRTVSGHSMRYWGQGTLVTVSS

SEQ ID NO: 431 - protein, 119 aa, Artificial Sequence
  Description of Artificial Sequence: Synthetic polypeptide
EVQLVESGGGLVQPGGSLTLSCVASGSTSHINAMGWYRRAPGKQRELVAGISSDGSRVYADSVKGRFTISRDNAKNSVYLQMNSLRAEDTAVYYCYYFRTVSGGSMRYWGQGTLVTVSS

SEQ ID NO: 432 - protein, 119 aa, Artificial Sequence
  Description of Artificial Sequence: Synthetic polypeptide
EVQLVESGGGLVQPGGSLTLSCVASGQTSSINAMGWYRRAPGKQRELVAGISSDGSQVYADSVKGRFTISRDNAKNSVYLQMNSLRAEDTAVYYCYYFRTKSGSSMRYWGQGTLVTVSS

SEQ ID NO: 433 - protein, 119 aa, Artificial Sequence
  Description of Artificial Sequence: Synthetic polypeptide
EVQLVESGGGLVQPGGSLTLSCVASGSTSRINGMGWYRRAPGKQRELPAGISSDGSKAYADSVKGRFTISRDNAKNSVYLQMNSLRAEDTAVYYCYYFRTASGTSMRYWGQGTLVTVSS

SEQ ID NO: 434 - protein, 119 aa, Artificial Sequence
  Description of Artificial Sequence: Synthetic polypeptide
EVQLVESGGGLVQPGGSLTLSCVASGSTSVINAMAWYRRAPGKQRELAAGISSDGSKVYAKSAKGRFTISRDNAKNSVYLQMNSLRAEDTAVYYCYYFNTVSGSSMRYWGQGTLVTVSS

SEQ ID NO: 435 - protein, 119 aa, Artificial Sequence
  Description of Artificial Sequence: Synthetic polypeptide
EVQLVESGGGLVQPGGSLTLSCVASGSTSSINAMAWYRRAPGKQRELVAGISSDGSKVYNDSVKGRFTISRDNAKNSVYLQMNSLRAEDTAVYYCYYFRTVRGSSQRYWGQGTLVTVSS

SEQ ID NO: 436 - protein, 119 aa, Artificial Sequence
  Description of Artificial Sequence: Synthetic polypeptide
EVQLVESGGGLVQPGGSLTLSCVASGKTSSINAMGWYRRAPGKQRELVAGISSDGSKVIADSVKGRFTISRDNAKNSVYLQMNSLRAEDTAVYYCYYFRTVLGSSMRYWGQGTLVTVSS

SEQ ID NO: 437 - protein, 119 aa, Artificial Sequence
  Description of Artificial Sequence: Synthetic polypeptide
EVQLVESGGGLVQPGGSLTLSCVASGSTSSINAMAWYRRAPGKQRELVAGISSDGSKVYTDSVKGRFTISRDNAKNSVYLQMNSLRAEDTAVYYCYYFRTRSGSSMRYWGQGTLVTVSS

SEQ ID NO: 438 - protein, 119 aa, Artificial Sequence
  Description of Artificial Sequence: Synthetic polypeptide
EVQLVESGGGLVQPGGSLTLSCVASGSVSSINAMGWYRRAPGKQRELVAGISSDGSKVYIDSVKGRFTISRDNAKNSVYLQMNSLRAEDTAVYYCYYFRTVSGLSMRYWGQGTLVTVSS

SEQ ID NO: 439 - protein, 119 aa, Artificial Sequence
  Description of Artificial Sequence: Synthetic polypeptide
EVQLVESGGGLVQPGGSLTLSCVASGNTSSINAMGWYRRAPGKQRELVAGISSDGSKVYYDSVKGRFTISRDNAKNSVYLQMNSLRAEDTAVYYCYYFRTVRGSSQRYWGQGTLVTVSS

SEQ ID NO: 440 - protein, 119 aa, Artificial Sequence
  Description of Artificial Sequence: Synthetic polypeptide
EVQLVESGGGLVQPGGSLTLSCVASGSTSSTNAMGWYRRAPGKQRELVAGISSDGSKVYVDSVKGRFTISRDNAKNSVYLQMNSLRAEDTAVYYCYYFRTVSGSSMVYWGQGTLVTVSS

SEQ ID NO: 441 - protein, 119 aa, Artificial Sequence
  Description of Artificial Sequence: Synthetic polypeptide
EVQLVESGGGLVQPGGSLTLSCVASGSTSSINAMGWYRRAPGKQRELVAGISSDGSKVYGDSVKGRFTISRDNAKNSVYLQMNSLRAEDTAVYYCYYFRTVSRSSMRYWGQGTLVTVSS

SEQ ID NO: 442 - protein, 119 aa, Artificial Sequence
  Description of Artificial Sequence: Synthetic polypeptide
EVQLVESGGGLVQPGGSLTLSCVASGSTSSINAMAWYRRAPGKQRELAAGISSDQSKVYADSAKGRFTISRDNAKNSVYLQMNSLRAEDTAVYYCYYFRTVSGSSMSYWGQGTLVTVSS

SEQ ID NO: 443 - protein, 119 aa, Artificial Sequence
  Description of Artificial Sequence: Synthetic polypeptide
EVQLVESGGGLVQPGGSLTLSCVASGGTSSINAMGWYRRAPGKQRELVAGISSDGSKVYSDSVKGRFTISRDNAKNSVYLQMNSLRAEDTAVYYCYYFRTVSGSSARYWGQGTLVTVSS

SEQ ID NO: 444 - protein, 119 aa, Artificial Sequence
  Description of Artificial Sequence: Synthetic polypeptide
EVQLVESGGGLVQPGGSLTLSCVASGSTRSINAMGWYRRAPGKQRELVAGISSDGSKVYADSVKGRFTISRDNAKNSVYLQMNSLRAEDTAVYYCYYFHTVSGSSMRYWGQGTLVTVSS

SEQ ID NO: 445 - protein, 119 aa, Artificial Sequence
  Description of Artificial Sequence: Synthetic polypeptide
EVQLVESGGGLVQPGGSLTLSCVASGTTSSINAMGWYRRAPGKQRELVAGISSDGSKVIADSVKGRFTISRDNAKNSVYLQMNSLRAEDTAVYYCYYFRTVLGSSMRYWGQGTLVTVSS

SEQ ID NO: 446 - protein, 119 aa, Artificial Sequence
  Description of Artificial Sequence: Synthetic polypeptide
EVQLVESGGGLVQPGGSLTLSCVASGSTSSINAMGWYRRAPGKQRELVAGISSDGSKVDADSVKGRFTISRDNAKNSVYLQMNSLRAEDTAVYYCYYFRTVSGSSMRYWGQGTLVTVSS

SEQ ID NO: 447 - protein, 119 aa, Artificial Sequence
  Description of Artificial Sequence: Synthetic polypeptide
EVQLVESGGGLVQPGGSLTLSCVASGSTSSINAMAWYRRAPGKQRELVAGISSDGSKVYKDSVKGRFTISRDNAKNSVYLQMNSLRAEDTAVYYCYYFRNVSGSSMRYWGQGTLVTVSS

SEQ ID NO: 448 - protein, 119 aa, Artificial Sequence
  Description of Artificial Sequence: Synthetic polypeptide
EVQLVESGGGLVQPGGSLTLSCVASGNTSSINAMGWYRRAPGKQRELVAGISSNGSKVYADSVKGRFTISRDNAKNSVYLQMNSLRAEDTAVYYCYYFRTVTGSSMRYWGQGTLVTVSS

SEQ ID NO: 449 - protein, 119 aa, Artificial Sequence
  Description of Artificial Sequence: Synthetic polypeptide
EVQLVESGGGLVQPGGSLTLSCVASGSTSRINAMGWYRRAPGKQRELVAGISSDGSKVYKDSVKGRFTISRDNAKNSVYLQMNSLRAEDTAVYYCYYFRTVSGSSMRYWGQGTLVTVSS

SEQ ID NO: 450 - protein, 119 aa, Artificial Sequence
  Description of Artificial Sequence: Synthetic polypeptide
EVQLVESGGGLVQPGGSLTLSCVASGSTSSINAIGWYRRAPGKQRELVAGISSDGSKVYADSVKGRFTISRDNAKNSVYLQMNSLRAEDTAVYYCYYFRTVKGSSMRYWGQGTLVTVSS

SEQ ID NO: 451 - protein, 119 aa, Artificial Sequence
  Description of Artificial Sequence: Synthetic polypeptide
EVQLVESGGGLVQPGGSLTLSCVASGLTSSINAMGWYRRAPGKQRELVAGISSDGSKVYQDSVKGRFTISRDNAKNSVYLQMNSLRAEDTAVYYCYYFRTNSGSSMRYWGQGTLVTVSS

SEQ ID NO: 452 - protein, 119 aa, Artificial Sequence
  Description of Artificial Sequence: Synthetic polypeptide
EVQLVESGGGLVQPGGSLTLSCVASGSTSSINAMAWYRRAPGKQRELVAGISSDGSKVYAESVKGRFTISRDNAKNSVYLQMNSLRAEDTAVYYCYYFRTVSGASMRYWGQGTLVTVSS

SEQ ID NO: 453 - protein, 119 aa, Artificial Sequence
  Description of Artificial Sequence: Synthetic polypeptide
EVQLVESGGGLVQPGGSLTLSCVASGSTSSTNAMGWYRRAPGKQRELVAGISSDGSKVLADSVKGRFTISRDNAKNSVYLQMNSLRAEDTAVYYCYYFRTVNLSSMRYWGQGTLVTVSS

SEQ ID NO: 454 - protein, 119 aa, Artificial Sequence
  Description of Artificial Sequence: Synthetic polypeptide
EVQLVESGGGLVQPGGSLTLSCVASGSTSSINAIGWYRRAPGKQRELVAGISSDGSKYYADSVKGRFTISRDNAKNSVYLQMNSLRAEDTAVYYCYYFRTVTGSSMRYWGQGTLVTVSS

SEQ ID NO: 455 - protein, 119 aa, Artificial Sequence
  Description of Artificial Sequence: Synthetic polypeptide
EVQLVESGGGLVQPGGSLTLSCVASGSTSSINAIGWYRRAPGKQRELVAGISSDGSKVYAVSVKGRFTISRDNAKNSVYLQMNSLRAEDTAVYYCYYFRKVSGSSARYWGQGTLVTVSS

SEQ ID NO: 456 - protein, 119 aa, Artificial Sequence
  Description of Artificial Sequence: Synthetic polypeptide
EVQLVESGGGLVQPGGSLTLSCVASGSTSSINAMGWYRRAPGKQRELVAGISSDGSKVVADSVKGRFTISRDNAKNSVYLQMNSLRAEDTAVYYCYYFRTYSGSSMRYWGQGTLVTVSS

SEQ ID NO: 457 - protein, 119 aa, Artificial Sequence
  Description of Artificial Sequence: Synthetic polypeptide
EVQLVESGGGLVQPGGSLTLSCVASGSTSSINAMGWYRRAPGKQRELVAGISSDGSKVYADSVKGRFTISRDNAKNSVYLQMNSLRAEDTAVYYCYYFRTVSKSSMRYWGQGTLVTVSS

SEQ ID NO: 458 - protein, 119 aa, Artificial Sequence
  Description of Artificial Sequence: Synthetic polypeptide
EVQLVESGGGLVQPGGSLTLSCVASGSTSSINAMAWYRRAPGKQRELVAGISSDGSKVYADSVKGRFTISRDNAKNSVYLQMNSLRAEDTAVYYCYYFKTVSGSSMRYWGQGTLVTVSS

SEQ ID NO: 459 - protein, 119 aa, Artificial Sequence
  Description of Artificial Sequence: Synthetic polypeptide
EVQLVESGGGLVQPGGSLTLSCVASGSTSSINAMAWYRRAPGKQRELAAGISSDNSKVYADSVKGRFTISRDNAKNSVYLQMNSLRAEDTAVYYCYYFRTRSGSSMRYWGQGTLVTVSS

SEQ ID NO: 460 - protein, 119 aa, Artificial Sequence
  Description of Artificial Sequence: Synthetic polypeptide
EVQLVESGGGLVQPGGSLTLSCVASGSKSSINAMGWYRRAPGKQRELAAGISSDGSKVYAQSVKGRFTISRDNAKNSVYLQMNSLRAEDTAVYYCYYFRTSSGSSMRYWGQGTLVTVSS

SEQ ID NO: 461 - protein, 119 aa, Artificial Sequence
  Description of Artificial Sequence: Synthetic polypeptide
EVQLVESGGGLVQPGGSLTLSCVASGTTSSINAMGWYRRAPGKQRELVAGISSDGSKVYVDSVKGRFTISRDNAKNSVYLQMNSLRAEDTAVYYCYYFRFLSGSSMRYWGQGTLVTVSS

SEQ ID NO: 462 - protein, 119 aa, Artificial Sequence
  Description of Artificial Sequence: Synthetic polypeptide
EVQLVESGGGLVQPGGSLTLSCVASGSTSSINAFGWYRRAPGKQRELVAGISSDGSKVYSDSVKGRFTISRDNAKNSVYLQMNSLRAEDTAVYYCYYFRTVSGSSMRYWGQGTLVTVSS

SEQ ID NO: 463 - protein, 119 aa, Artificial Sequence
  Description of Artificial Sequence: Synthetic polypeptide
EVQLVESGGGLVQPGGSLTLSCVASGSTFSINAMGWYRRAPGKQRELVAGISSDGSKVLADSVKGRFTISRDNAKNSVYLQMNSLRAEDTAVYYCYYFRLVSGSSMRYWGQGTLVTVSS

SEQ ID NO: 464 - protein, 119 aa, Artificial Sequence
  Description of Artificial Sequence: Synthetic polypeptide
EVQLVESGGGLVQPGGSLTLSCVASGSTRSINAMGWYRRAPGKQRELVAGISSDGSKVYNDSVKGRFTISRDNAKNSVYLQMNSLRAEDTAVYYCYYFRTVSGSSMRFWGQGTLVTVSS

SEQ ID NO: 465 - protein, 119 aa, Artificial Sequence
  Description of Artificial Sequence: Synthetic polypeptide
EVQLVESGGGLVQPGGSLTLSCVASGSTSSINAIGWYRRAPGKQRELVAGISSDGSKVYNDSVKGRFTISRDNAKNSVYLQMNSLRAEDTAVYYCYYFRTQSGSSMRYWGQGTLVTVSS

SEQ ID NO: 466 - protein, 119 aa, Artificial Sequence
  Description of Artificial Sequence: Synthetic polypeptide
EVQLVESGGGLVQPGGSLTLSCVASGSTSSINAMGWYRRAPGKQRELVAGISSDGSKVYVDSVKGRFTISRDNAKNSVYLQMNSLRAEDTAVYYCYYFRTVSGSSMPYWGQGTLVTVSS

SEQ ID NO: 467 - protein, 119 aa, Artificial Sequence
  Description of Artificial Sequence: Synthetic polypeptide
EVQLVESGGGLVQPGGSLTLSCVASGSTSSINAMGWYRRAPGKQRELVAGISSDGSKVVADSVKGRFTISRDNAKNSVYLQMNSLRAEDTAVYYCYYFRTLSGSSMRYWGQGTLVTVSS

SEQ ID NO: 468 - protein, 119 aa, Artificial Sequence
  Description of Artificial Sequence: Synthetic polypeptide
EVQLVESGGGLVQPGGSLTLSCVASGTTSSINAMGWYRRAPGKQRELVAGISSDGSKVYGDSVKGRFTISRDNAKNSVYLQMNSLRAEDTAVYYCYYFRTVSGSAMRYWGQGTLVTVSS

SEQ ID NO: 469 - protein, 119 aa, Artificial Sequence
  Description of Artificial Sequence: Synthetic polypeptide
EVQLVESGGGLVQPGGSLTLSCVASGSTSSINAMAWYRRAPGKQRELVAGISSDGSKVYTDSVKGRFTISRDNAKNSVYLQMNSLRAEDTAVYYCYYFRTTSGSSMRYWGQGTLVTVSS

SEQ ID NO: 470 - protein, 119 aa, Artificial Sequence
  Description of Artificial Sequence: Synthetic polypeptide
EVQLVESGGGLVQPGGSLTLSCVASGRTSSINAMGWYRRAPGKQRELVAGISSDGSKVYNDSVKGRFTISRDNAKNSVYLQMNSLRAEDTAVYYCYYFRTVSGTSMRYWGQGTLVTVSS

SEQ ID NO: 471 - protein, 119 aa, Artificial Sequence
  Description of Artificial Sequence: Synthetic polypeptide
EVQLVESGGGLVQPGGSLTLSCVASGSTSSRNAMGWYRRAPGKQRELVAGISSDGSKVTADSVKGRFTISRDNAKNSVYLQMNSLRAEDTAVYYCYYFRTRSGSSMRYWGQGTLVTVSS

SEQ ID NO: 472 - protein, 119 aa, Artificial Sequence
  Description of Artificial Sequence: Synthetic polypeptide
EVQLVESGGGLVQPGGSLTLSCVASGSTKSINAMGWYRRAPGKQRELVAGISSDGSKVYRDSVKGRFTISRDNAKNSVYLQMNSLRAEDTAVYYCYYFRTSSGSSMRYWGQGTLVTVSS

SEQ ID NO: 473 - protein, 119 aa, Artificial Sequence
  Description of Artificial Sequence: Synthetic polypeptide
EVQLVESGGGLVQPGGSLTLSCVASGSTSSRNAMGWYRRAPGKQRELVAGISSNGSKVYSDSVKGRFTISRDNAKNSVYLQMNSLRAEDTAVYYCYYFRTVSGSSMSYWGQGTLVTVSS

SEQ ID NO: 474 - protein, 119 aa, Artificial Sequence
  Description of Artificial Sequence: Synthetic polypeptide
EVQLVESGGGLVQPGGSLTLSCVASGSTSSINAIGWYRRAPGKQRELVAGISSDGSKVYSDSVKGRFTISRDNAKNSVYLQMNSLRAEDTAVYYCYYFRPVSGSSMRYWGQGTLVTVSS

SEQ ID NO: 475 - protein, 119 aa, Artificial Sequence
  Description of Artificial Sequence: Synthetic polypeptide
EVQLVESGGGLVQPGGSLTLSCVASGSTSLINAMGWYRRAPGKQRELVAGISSDGSKVYADSVKGRFTISRDNAKNSVYLQMNSLRAEDTAVYYCYYFRHVSGSSMRYWGQGTLVTVSS

SEQ ID NO: 476 - protein, 119 aa, Artificial Sequence
  Description of Artificial Sequence: Synthetic polypeptide
EVQLVESGGGLVQPGGSLTLSCVASGSTSSINAMAWYRRAPGKQRELVAGISSDGSKVYADSVKGRFTISRDNAKNSVYLQMNSLRAEDTAVYYCYYFRTKSGSSMRYWGQGTLVTVSS

SEQ ID NO: 477 - protein, 119 aa, Artificial Sequence
  Description of Artificial Sequence: Synthetic polypeptide
EVQLVESGGGLVQPGGSLTLSCVASGSTSSINAMGWYRRAPGKQRELVAGISSDGSLVYADSVKGRFTISRDNAKNSVYLQMNSLRAEDTAVYYCYYFTTVSGSSMRYWGQGTLVTVSS

SEQ ID NO: 478 - protein, 119 aa, Artificial Sequence
  Description of Artificial Sequence: Synthetic polypeptide
EVQLVESGGGLVQPGGSLTLSCVASGTTSSINAMGWYRRAPGKQRELVAGISSDGTKVYADSVKGRFTISRDNAKNSVYLQMNSLRAEDTAVYYCYYFHTVSGSSMRYWGQGTLVTVSS

SEQ ID NO: 479 - protein, 119 aa, Artificial Sequence
  Description of Artificial Sequence: Synthetic polypeptide
EVQLVESGGGLVQPGGSLTLSCVASGSTSSINAFGWYRRAPGKQRELVAGISSDGSKVYADSVKGRFTISRDNAKNSVYLQMNSLRAEDTAVYYCYYFRTVRGSSMRYWGQGTLVTVSS

SEQ ID NO: 480 - protein, 119 aa, Artificial Sequence
  Description of Artificial Sequence: Synthetic polypeptide
EVQLVESGGGLVQPGGSLTLSCVASGSTSSRNAMGWYRRAPGKQRELVAGISSDGSKLYLDSVKGRFTISRDNAKNSVYLQMNSLRAEDTAVYYCYYFRTVLGSSMRYWGQGTLVTVSS

SEQ ID NO: 481 - protein, 119 aa, Artificial Sequence
  Description of Artificial Sequence: Synthetic polypeptide
EVQLVESGGGLVQPGGSLTLSCVASGNTSSINAMGWYRRAPGKQRELVAGISSDGSRVYADSVKGRFTISRDNAKNSVYLQMNSLRAEDTAVYYCYYFRTVSGSSMRSWGQGTLVTVSS

SEQ ID NO: 482 - protein, 119 aa, Artificial Sequence
  Description of Artificial Sequence: Synthetic polypeptide
EVQLVESGGGLVQPGGSLTLSCVASGTTSSINAMGWYRRAPGKQRELVAGISSDGSKVYNDSVKGRFTISRDNAKNSVYLQMNSLRAEDTAVYYCYYFRTVRGSSMRYWGQGTLVTVSS

SEQ ID NO: 483 - protein, 119 aa, Artificial Sequence
  Description of Artificial Sequence: Synthetic polypeptide
EVQLVESGGGLVQPGGSLTLSCVASGSTASINAMGWYRRAPGKQRELVAGISSDGSKVYADSVKGRFTISRDNAKNSVYLQMNSLRAEDTAVYYCYYFRYVSGSSMRYWGQGTLVTVSS

SEQ ID NO: 484 - protein, 119 aa, Artificial Sequence
  Description of Artificial Sequence: Synthetic polypeptide
EVQLVESGGGLVQPGGSLTLSCVASGSTSSINAVGWYRRAPGKQRELVAGISSDGSKVYVDSVKGRFTISRDNAKNSVYLQMNSLRAEDTAVYYCYYFRTVYGSSMRYWGQGTLVTVSS

SEQ ID NO: 485 - protein, 119 aa, Artificial Sequence
  Description of Artificial Sequence: Synthetic polypeptide
EVQLVESGGGLVQPGGSLTLSCVASGSTSSRNAMGWYRRAPGKQRELVAGISSDGSKLYADSVKGRFTISRDNAKNSVYLQMNSLRAEDTAVYYCYYFRTVLGSSMRYWGQGTLVTVSS

SEQ ID NO: 486 - protein, 119 aa, Artificial Sequence
  Description of Artificial Sequence: Synthetic polypeptide
EVQLVESGGGLVQPGGSLTLSCVASGSTNSINAMGWYRRAPGKQRELVAGISSDGSKVYKDSVKGRFTISRDNAKNSVYLQMNSLRAEDTAVYYCYYYRTVSGSSMRYWGQGTLVTVSS

SEQ ID NO: 487 - protein, 119 aa, Artificial Sequence
  Description of Artificial Sequence: Synthetic polypeptide
EVQLVESGGGLVQPGGSLTLSCVASGSTSSINAMAWYRRAPGKQRELVAGISSDGSKVYADSVKGRFTISRDNAKNSVYLQMNSLRAEDTAVYYCYYFRSVSGSSMRYWGQGTLVTVSS

SEQ ID NO: 488 - protein, 119 aa, Artificial Sequence
  Description of Artificial Sequence: Synthetic polypeptide
EVQLVESGGGLVQPGGSLTLSCVASGSTSRINAMGWYRRAPGKQRELVAGISSDGSKVYQDSVKGRFTISRDNAKNSVYLQMNSLRAEDTAVYYCYYFRRVSGSSMRYWGQGTLVTVSS

SEQ ID NO: 489 - protein, 119 aa, Artificial Sequence
  Description of Artificial Sequence: Synthetic polypeptide
EVQLVESGGGLVQPGGSLTLSCVPSGSTSNINAMGWYRRAPGKQRELPAGISSDGTKIYADSAKVPFTITRDNAKNSVYLQMNSLRAEDTAVYYCYYFRTVSGTSMRYWGQGTLVTVSS

SEQ ID NO: 490 - protein, 119 aa, Artificial Sequence
  Description of Artificial Sequence: Synthetic polypeptide
EVQLVESGGGLVQPGGSLTLSCVASGSTSKINAMGWYRRAPGKQRELVAGISSDRSKVYADSVKGRFTISRDNAKNSVYLQMNSLRAEDTAVYYCYYFRTVAGSSMRYWGQGTLVTVSS

SEQ ID NO: 491 - protein, 119 aa, Artificial Sequence
  Description of Artificial Sequence: Synthetic polypeptide
EVQLVESGGGLVQPGGSLTLSCVASGSTSSINALGWYRRAPGKQRELVAGISSDGSLVYADSVKGRFTISRDNAKNSVYLQMNSLRAEDTAVYYCYYFRIVSGSSMRYWGQGTLVTVSS

SEQ ID NO: 492 - protein, 119 aa, Artificial Sequence
  Description of Artificial Sequence: Synthetic polypeptide
EVQLVESGGGLVQPGGSLTLSCVASGSTSRINAMGWYRRAPGKQRELVAGISSDGSKVYADSVKGRFTISRDNAKNSVYLQMNSLRAEDTAVYYCYYFRTASGSSMRYWGQGTLVTVSS

SEQ ID NO: 493 - protein, 119 aa, Artificial Sequence
  Description of Artificial Sequence: Synthetic polypeptide
EVQLVESGGGLVQPGGSLTLSCVASGSTSSINAMGWYRRAPGKQRELVAGISSDGSKVYSDSVKGRFTISRDNAKNSVYLQMNSLRAEDTAVYYCYYFRTVSGSSSRYWGQGTLVTVSS

SEQ ID NO: 494 - protein, 119 aa, Artificial Sequence
  Description of Artificial Sequence: Synthetic polypeptide
EVQLVESGGGLVQPGGSLTLSCVASGSTSSINAVGWYRRAPGKQRELVAGISSDGTKVYRDSVKGRFTISRDNAKNSVYLQMNSLRAEDTAVYYCYYFRTVQGSSMRYWGQGTLVTVSS

SEQ ID NO: 495 - protein, 119 aa, Artificial Sequence
  Description of Artificial Sequence: Synthetic polypeptide
EVQLVESGGGLVQPGGSLTLSCVASGTTSSINAMGWYRRAPGKQRELAAGISSDGSKVYNDSVKGRFTISRDNAKNSVYLQMNSLRAEDTAVYYCYYFRTVRGSSMRYWGQGTLVTVSS

SEQ ID NO: 496 - protein, 119 aa, Artificial Sequence
  Description of Artificial Sequence: Synthetic polypeptide
EVQLVESGGGLVQPGGSLTLSCVASGSTSSINAMGWYRRAPGKQRELVAGISSDGSKVYADSVKGRFTISRDNAKNSVYLQMNSLRAEDTAVYYCYYFRTKSGSSMRYWGQGTLVTVSS

SEQ ID NO: 497 - protein, 119 aa, Artificial Sequence
  Description of Artificial Sequence: Synthetic polypeptide
EVQLVESGGGLVQPGGSLTLSCVASGTTSSINAMGWYRRAPGKQRELVAGISSDGSKVYADSVKGRFTISRDNAKNSVYLQMNSLRAEDTAVYYCYYFRTVWGSSMRYWGQGTLVTVSS

SEQ ID NO: 498 - protein, 119 aa, Artificial Sequence
  Description of Artificial Sequence: Synthetic polypeptide
EVQLVESGGGLVQPGGSLTLSCVASGKTSSINAMGWYRRAPGKQRELVAGISSDGSKVYTDSVKGRFTISRDNAKNSVYLQMNSLRAEDTAVYYCYYFRTRSGSSMRYWGQGTLVTVSS

SEQ ID NO: 499 - protein, 119 aa, Artificial Sequence
  Description of Artificial Sequence: Synthetic polypeptide
EVQLVESGGGLVQPGGSLTLSCVASGSTSSINAMGWYRRAPFKQGELPAGISPDGTKAYADSAKVRFTISRDNAKNSVYLQMNSLRAEDTAVYYCYYFHTVCGTSMGYWGQGTLVTVSS

SEQ ID NO: 500 - protein, 119 aa, Artificial Sequence
  Description of Artificial Sequence: Synthetic polypeptide
EVQLVESGGGLVQPGGSLTLSCVASGSTSAINAMGWYRRAPGKQRELVAGISSDGSKVYVDSVKGRFTISRDNAKNSVYLQMNSLRAEDTAVYYCYYFRTVSGSSQRYWGQGTLVTVSS

SEQ ID NO: 501 - protein, 119 aa, Artificial Sequence
  Description of Artificial Sequence: Synthetic polypeptide
EVQLVESGGGLVQPGGSLTLSCVASGSPSSINAYGWYRRAPGKQRELVAGISSDGSKVYSDSVKGRFTISRDNAKNSVYLQMNSLRAEDTAVYYCYYFRTVSGSSMSYWGQGTLVTVSS

SEQ ID NO: 502 - protein, 119 aa, Artificial Sequence
  Description of Artificial Sequence: Synthetic polypeptide
EVQLVESGGGLVQPGGSLTLSCVASGSTSSINAMGWYRRAPGKQRELVAGISSDGSKVYASSVKGRFTISRDNAKNSVYLQMNSLRAEDTAVYYCYYFRTVRGSSMRYWGQGTLVTVSS

SEQ ID NO: 503 - protein, 119 aa, Artificial Sequence
  Description of Artificial Sequence: Synthetic polypeptide
EVQLVESGGGLVQPGGSLTLSCVASGSRSSINAMGWYRRAPGKQRELVAGISADGSKVYADSVKGRFTISRDNAKNSVYLQMNSLRAEDTAVYYCYYFRTQSGSSMRYWGQGTLVTVSS

SEQ ID NO: 504 - protein, 119 aa, Artificial Sequence
  Description of Artificial Sequence: Synthetic polypeptide
EVQLVESGGGLVQPGGSLTLSCVASGSVSSINAMGWYRRAPGKQRELVAGISSDGSKVYASSAKGRFTISRDNAKNSVYLQMNSLRAEDTAVYYCYYFRTLSGSSMRYWGQGTLVTVSS

SEQ ID NO: 505 - protein, 119 aa, Artificial Sequence
  Description of Artificial Sequence: Synthetic polypeptide
EVQLVESGGGLVQPGGSLTLSCVASGSTSSINAMAWYRRAPGKQRELVAGISSDGSKVYADSVKGRFTISRDNAKNSVYLQMNSLRAEDTAVYYCYYFHTVSGSSMRYWGQGTLVTVSS

SEQ ID NO: 506 - protein, 119 aa, Artificial Sequence
  Description of Artificial Sequence: Synthetic polypeptide
EVQLVESGGGLVQPGGSLTLSCVASGSTSSINAIGWYRRAPGKQRELVAGISSDGSSVYADSVKGRFTISRDNAKNSVYLQMNSLRAEDTAVYYCYYFRRVSGSSMRYWGQGTLVTVSS

SEQ ID NO: 507 - protein, 119 aa, Artificial Sequence
  Description of Artificial Sequence: Synthetic polypeptide
EVQLVESGGGLVQPGGSLTLSCVASGSTSSINAMGWYRRAPGKQRELVAGISSDGSKVYSDSVKGRFTISRDNAKNSVYLQMNSLRAEDTAVYYCYYFRLVSGSSMRYWGQGTLVTVSS

SEQ ID NO: 508 - protein, 119 aa, Artificial Sequence
  Description of Artificial Sequence: Synthetic polypeptide
EVQLVESGGGLVQPGGSLTLSCVASGSTSSINAVGWYRRAPGKQRELVAGISSDGSKVYAGSVKGRFTISRDNAKNSVYLQMNSLRAEDTAVYYCYYFRTVSGSYMRYWGQGTLVTVSS

SEQ ID NO: 509 - protein, 119 aa, Artificial Sequence
  Description of Artificial Sequence: Synthetic polypeptide
EVQLVESGGGLVQPGGSLTLSCVASGSTSSINAMAWYRRAPGKQRELAAGISSDNSKVYADSVKGRFTISRDNAKNSVYLQMNSLRAEDTAVYYCYYFRTVGGSSMRYWGQGTLVTVSS

SEQ ID NO: 510 - protein, 119 aa, Artificial Sequence
  Description of Artificial Sequence: Synthetic polypeptide
EVQLVESGGGLVQPGGSLTLSCVASGSTSSINAYGWYRRAPGKQRELVAGISSDGSAVYADSVKGRFTISRDNAKNSVYLQMNSLRAEDTAVYYCYYFRTHSGSSMRYWGQGTLVTVSS

SEQ ID NO: 511 - protein, 119 aa, Artificial Sequence
  Description of Artificial Sequence: Synthetic polypeptide
EVQLVESGGGLVQPGGSLTLSCVASGSTSSINAVGWYRRAPGKQRELVAGISSDGSSVYADSVKGRFTISRDNAKNSVYLQMNSLRAEDTAVYYCYYFRTVSTSSMRYWGQGTLVTVSS

SEQ ID NO: 512 - protein, 119 aa, Artificial Sequence
  Description of Artificial Sequence: Synthetic polypeptide
EVQLVESGGGLVQPGGSLTLSCVASGSKSSINAMGWYRRAPGKQRELPAGISSNGTKVYADSAKVRFTISRDNAKNSVYLQMNSLRAEDTAVYYCYYFRTVLGTSMRYWGQGTLVTVSS

SEQ ID NO: 513 - protein, 119 aa, Artificial Sequence
  Description of Artificial Sequence: Synthetic polypeptide
EVQLVESGGGLVQPGGSLTLSCVASGSTSSINAMAWYRRAPGKQRELVAGISSDGSKLYADSVKGRFTISRDNAKNSVYLQMNSLRAEDTAVYYCYYFRTVSGSSMRYWGQGTLVTVSS

SEQ ID NO: 514 - protein, 119 aa, Artificial Sequence
  Description of Artificial Sequence: Synthetic polypeptide
EVQLVESGGGLVQPGGSLTLSCVASGSVSSINAMGWYRRAPGKQRELVAGISSDGSKVYKDSVKGRFTISRDNAKNSVYLQMNSLRAEDTAVYYCYYFRTVSGSSMGYWGQGTLVTVSS

SEQ ID NO: 515 - protein, 119 aa, Artificial Sequence
  Description of Artificial Sequence: Synthetic polypeptide
EVQLVESGGGLVQPGGSLTLSCVASGSTSSINAMGWYRRAPGKQRELVAGISSDGSLVYADSVKGRFTISRDNAKNSVYLQMNSLRAEDTAVYYCYYFRTVSGSSMRAWGQGTLVTVSS

SEQ ID NO: 516 - protein, 119 aa, Artificial Sequence
  Description of Artificial Sequence: Synthetic polypeptide
EVQLVESGGGLVQPGGSLTLSCVASGSTSSINAMGWYRRAPGKQRELVAGISSDGSLVYADSVKGRFTISRDNAKNSVYLQMNSLRAEDTAVYYCYYFRILSGSSMRYWGQGTLVTVSS

SEQ ID NO: 517 - protein, 119 aa, Artificial Sequence
  Description of Artificial Sequence: Synthetic polypeptide
EVQLVESGGGLVQPGGSLTLSCVASGSTSSINAMAWYRRAPGKQRELVAGISSDGSKVYADSVKGRFTISRDNAKNSVYLQMNSLRAEDTAVYYCYYFRTVQGSSMRYWGQGTLVTVSS

SEQ ID NO: 518 - protein, 119 aa, Artificial Sequence
  Description of Artificial Sequence: Synthetic polypeptide
EVQLVESGGGLVQPGGSLTLSCVASGSTSYINAMGWYRRAPGKQRELVAGISSDGSKVYADSVKGRFTISRDNAKNSVYLQMNSLRAEDTAVYYCYYFRTVSGQSMGYWGQGTLVTVSS

SEQ ID NO: 519 - protein, 119 aa, Artificial Sequence
  Description of Artificial Sequence: Synthetic polypeptide
EVQLVESGGGLVQPGGSLTLSCVASGSTSSINAVGWYRRAPGKQRELVAGISSDGSTVYADSVKGRFTISRDNAKNSVYLQMNSLRAEDTAVYYCYYFRTVSGHSMRYWGQGTLVTVSS

SEQ ID NO: 520 - protein, 119 aa, Artificial Sequence
  Description of Artificial Sequence: Synthetic polypeptide
EVQLVESGGGLVQPGGSLTLSCVASGSTSSINAMGWYRRAPGKQRELAAGISKDGSKVYADSAKGRFTISRDNAKNSVYLQMNSLRAEDTAVYYCYYFRTVSGSSSRYWGQGTLVTVSS

SEQ ID NO: 521 - protein, 119 aa, Artificial Sequence
  Description of Artificial Sequence: Synthetic polypeptide
EVQLVESGGGLVQPGGSLTLSCVASGSPSSINAYGWYRRAPGKQRELVAGISSDGSKVYSDSVKGRFTISRDNAKNSVYLQMNSLRAEDTAVYYCYYFRTVSGSSYSYWGQGTLVTVSS

SEQ ID NO: 522 - protein, 119 aa, Artificial Sequence
  Description of Artificial Sequence: Synthetic polypeptide
EVQLVESGGGLVQPGGSLTLSCVASGSPSSINAYGWYRRAPGKQRELVAGISSDGSKVYSDSVKGRFTISRDNAKNSVYLQMNSLRAEDTAVYYCYYFRTVSGSSQSYWGQGTLVTVSS

SEQ ID NO: 523 - protein, 117 aa, Artificial Sequence
  Description of Artificial Sequence: Synthetic polypeptide
EVQLVESGGGLVQPGGSLTLSCAASGSSVKFLSMAWYRQAPGKKRELVAGISADGSTDYIDSVKGRFTISRDNAKNSVYLQMNSLRAEDTAVYYCYAYRWTRRYTYWGQGTLVTVSS

SEQ ID NO: 524 - protein, 117 aa, Artificial Sequence
  Description of Artificial Sequence: Synthetic polypeptide
EVQLVESGGGLVQPGGSLTLSCAASGSSVSFLSLAWYRQAPGKKRELVAGISADGSTAYIDSVKGRFTISRDNAKNSVYLQMNSLRAEDTAVYYCYAYRWRTRYTYWGQGTLVTVSS

SEQ ID NO: 525 - protein, 117 aa, Artificial Sequence
  Description of Artificial Sequence: Synthetic polypeptide
EVQLVESGGGLVQPGGSLTLSCAASGSRVSFLSMAWYRQAPGKKRELVAGISRDGSTDYIDSVKGRFTISRDNAKNSVYLQMNSLRAEDTAVYYCYAYRWTTRRTYWGQGTLVTVSS

SEQ ID NO: 526 - protein, 117 aa, Artificial Sequence
  Description of Artificial Sequence: Synthetic polypeptide
EVQLVESGGGLVQPGGSLTLSCAASGSQVSFLSMAWYRQAPGKKRELVAGISRDGSTDYIDSVKGRFTISRDNAKNSVYLQMNSLRAEDTAVYYCYAYRWTTRYIYWGQGTLVTVSS

SEQ ID NO: 527 - protein, 117 aa, Artificial Sequence
  Description of Artificial Sequence: Synthetic polypeptide
EVQLVESGGGLVQPGGSLTLSCAASGSSVSFLSMAWYRQAPGKKRELVAGISEAGSTDYIDSVKGRFTISRDNAKNSVYLQMNSLRAEDTAVYYCYAYRWRTRYTYWGQGTLVTVSS

SEQ ID NO: 528 - protein, 117 aa, Artificial Sequence
  Description of Artificial Sequence: Synthetic polypeptide
EVQLVESGGGLVQPGGSLTLRCAASGSKVSFLSMAWYRQAPGKKRELVAGISADGSTDYVDSVKGRFTISRDNAKNSVYLQMNSLRAEDTAVYYCYAYRWTRRYTYWGQGTLVTVSS

SEQ ID NO: 529 - protein, 117 aa, Artificial Sequence
  Description of Artificial Sequence: Synthetic polypeptide
EVQLVESGGGLVQPGGSLTLSCAASGSSVGFLSMAWYRQAPGKKRELVAGISADGSTDYIRSVKGRFTISRDNAKNSVYLQMNSLRAEDTAVYYCYAYRWRTRYTYWGQGTLVTVSS

SEQ ID NO: 530 - protein, 117 aa, Artificial Sequence
  Description of Artificial Sequence: Synthetic polypeptide
EVQLVESGGGLVQPGGSLTLSCAASGSSVSFLSMAWYRQAPGKKRELVAGISADGSVDYIDSVKGRFTISRDNAKNSVYLQMNSLRAEDTAVYYCYAYRWTTRYIYWGQGTLVTVSS

SEQ ID NO: 531 - protein, 117 aa, Artificial Sequence
  Description of Artificial Sequence: Synthetic polypeptide
EVQLVESGGGLVQPGGSLTLSCAASGSRVSFLSMAWYRQAPGKKRELVAGISADGSTLYIDSVKGRFTISRDNAKNSVYLQMNSLRAEDTAVYYCYAYRWTTRRTYWGQGTLVTVSS

SEQ ID NO: 532 - protein, 117 aa, Artificial Sequence
  Description of Artificial Sequence: Synthetic polypeptide
EVQLVESGGGLVQPGGSLTLSCAASGSSVSFLSLAWYRQAPGKKRELVAGISTDGSTDYIDSVKGRFTISRDNAKNSVYLQMNSLRAEDTAVYYCYAYRWRTRYTYWGQGTLVTVSS

SEQ ID NO: 533 - protein, 117 aa, Artificial Sequence
  Description of Artificial Sequence: Synthetic polypeptide
EVQLVESGGGLVQPGGSLTLSCAASGSSVSFLSMAWYRQAPGKKRELVAGISGDGSTDYIDSVKGRFTISRDNAKNSVYLQMNSLRAEDTAVYYCYAYRWTTRYTYWGQGTLVTVSS

SEQ ID NO: 534 - protein, 117 aa, Artificial Sequence
  Description of Artificial Sequence: Synthetic polypeptide
EVQLVESGGGLVQPGGSLTLSCAASGSSVQFLSMAWYRQAPGKKRELVAGISADGSTDYINSVKGRFTISRDNAKNSVYLQMNSLRAEDTAVYYCYAYRWRTRYTYWGQGTLVTVSS

SEQ ID NO: 535 - protein, 117 aa, Artificial Sequence
  Description of Artificial Sequence: Synthetic polypeptide
EVQLVESGGGLVQPGGSLTLSCAASGSNVSFLSMAWYRQAPGKKRELVAGISARGSTDYIDSVKGRFTISRDNAKNSVYLQMNSLRAEDTAVYYCYAYHWTTRYTYWGQGTLVTVSS

SEQ ID NO: 536 - protein, 117 aa, Artificial Sequence
  Description of Artificial Sequence: Synthetic polypeptide
EVQLVESGGGLVQPGGSLTLSCVASGSSVKFLSMAWYRQAPGKKRELVAGISADGSTTYIDSVKGRFTISRDNAKNSVYLQMNSLRAEDTAVYYCYAYRWTTRRTYWGQGTLVTVSS

SEQ ID NO: 537 - protein, 117 aa, Artificial Sequence
  Description of Artificial Sequence: Synthetic polypeptide
EVQLVESGGGLVQPGGSLTLSCAASGKSVSFLSMAWYRQAPGKKRELVAGISKDGSTDYIDSVKGRFTISRDNAKNSVYLQMNSLRAEDTAVYYCYAYRWTTRYTYWGQGTLVTVSS

SEQ ID NO: 538 - protein, 117 aa, Artificial Sequence
  Description of Artificial Sequence: Synthetic polypeptide
EVQLVESGGGLVQPGGSLTLSCAASGSRVSFLSMAWYRQAPGKKRELVAGISADGSTTYIDSVKGRFTISRDNAKNSVYLQMNSLRAEDTAVYYCYAYRWTTRYTYWGQGTLVTVSS

SEQ ID NO: 539 - protein, 117 aa, Artificial Sequence
  Description of Artificial Sequence: Synthetic polypeptide
EVQLVESGGGLVQPGGSLTLSCAASGSHVSFLSMAWYRQAPGKKRELVAGISANGSTDYIDSVKGRFTISRDNAKNSVYLQMNSLRAEDTAVYYCYAYRWTTRYAYWGQGTLVTVSS

SEQ ID NO: 540 - protein, 117 aa, Artificial Sequence
  Description of Artificial Sequence: Synthetic polypeptide
EVQLVESGGGLVQPGGSLTLSCAASGSSVSFLSMAWYRQAPGKKRELVAGISRDGSTDYIDSVKGRFTISRDNAKNSVYLQMNSLRAEDTAVYYCYAYRWVTRYTYWGQGTLVTVSS

SEQ ID NO: 541 - protein, 117 aa, Artificial Sequence
  Description of Artificial Sequence: Synthetic polypeptide
EVQLVESGGGLVQPGGSLTLSCAASGSSVSFLSMAWYRQAPGKKRELVAGISADGSADYIDSVKGRFTISRDNAKNSVYLQMNSLRAEDTAVYYCYAYRWVTRYTYWGQGTLVTVSS

SEQ ID NO: 542 - protein, 117 aa, Artificial Sequence
  Description of Artificial Sequence: Synthetic polypeptide
EVQLVESGGGLVQPGGSLTLSCAASGSSVRFLSMAWYRQAPGKKRELVAGISAHGSTDYIDSVKGRFTISRDNAKNSVYLQMNSLRAEDTAVYYCYAYRWSTRYTYWGQGTLVTVSS

SEQ ID NO: 543 - protein, 117 aa, Artificial Sequence
  Description of Artificial Sequence: Synthetic polypeptide
EVQLVESGGGLVQPGGSLTLSCAASGSSVRFLSMAWYRQAPGKKRELVAGISADGSTIYIDSVKGRFTISRDNAKNSVYLQMNSLRAEDTAVYYCYAYRWRTRYTYWGQGTLVTVSS

SEQ ID NO: 544 - protein, 117 aa, Artificial Sequence
  Description of Artificial Sequence: Synthetic polypeptide
EVQLVESGGGLVQPGGSLTLSCAASGSSVRFLSMAWYRQAPGKKRELVAGISRDGSTVYIDSVKGRFTISRDNAKNSVYLQMNSLRAEDTAVYYCYAYRWTTRGTYWGQGTLVTVSS

SEQ ID NO: 545 - protein, 117 aa, Artificial Sequence
  Description of Artificial Sequence: Synthetic polypeptide
EVQLVESGGGLVQPGGSLTLSCAASGSHVSFLSMAWYRQAPGKKRELVAGISADGPTDYIDSVKGRFTISRDNAKNSVYLQMNSLRAEDTAVYYCYAYRWDTRYTYWGQGTLVTVSS

SEQ ID NO: 546 - protein, 117 aa, Artificial Sequence
  Description of Artificial Sequence: Synthetic polypeptide
EVQLVESGGGLVQPGGSLTLSCVASGTSVSFLSMAWYRQAPGKKRELVAGISADGSTTYIDSVKGRFTISRDNAKNSVYLQMNSLRAEDTAVYYCYAYRWTTRRTYWGQGTLVTVSS

SEQ ID NO: 547 - protein, 117 aa, Artificial Sequence
  Description of Artificial Sequence: Synthetic polypeptide
EVQLVESGGGLVQPGGSLTLSCAASGTSVSFLSIAWYRQAPGKKRELVAGISADGSTDYIASVKGRFTISRDNAKNSVYLQMNSLRAEDTAVYYCYAYRWRTRYTYWGQGTLVTVSS

SEQ ID NO: 548 - protein, 117 aa, Artificial Sequence
  Description of Artificial Sequence: Synthetic polypeptide
EVQLVESGGGLVQPGGSLTLSCAASGSSVKFLSMAWYRQAPGKKRELVAGISLDGSTDYIDSVKGRFTISRDNAKNSVYLQMNSLRAEDTAVYYCYAYRWTGRYTYWGQGTLVTVSS

SEQ ID NO: 549 - protein, 117 aa, Artificial Sequence
  Description of Artificial Sequence: Synthetic polypeptide
EVQLVESGGGLVQPGGSLTLSCAASGSSVSFLSMAWYRQAPGKKRELVAGISADGSTIYIDSVKGRFTISRDNAKNSVYLQMNSLRAEDTAVYYCYAYRWRTRYTYWGQGTLVTVSS

SEQ ID NO: 550 - protein, 117 aa, Artificial Sequence
  Description of Artificial Sequence: Synthetic polypeptide
EVQLVESGGGLVQPGGSLTLSCAASGSSVRFLSMAWYRQAPGKKRELVAGISAHGSTDYIDSVKGRFTISRDNAKNSVYLQMNSLRAEDTAVYYCYAYRWRTRYTYWGQGTLVTVSS

SEQ ID NO: 551 - protein, 117 aa, Artificial Sequence
  Description of Artificial Sequence: Synthetic polypeptide
EVQLVESGGGLVQPGGSLTLSCAASGSSVSFLSMAWYRQAPGKKRELVAGISRDGSTDYIDSVKGRFTISRDNAKNSVYLQMNSLRAEDTAVYYCYAYRWITRYTYWGQGTLVTVSS

SEQ ID NO: 552 - protein, 117 aa, Artificial Sequence
  Description of Artificial Sequence: Synthetic polypeptide
EVQLVESGGGLVQPGGSLTLSCAASGSSVRFLSMAWYRQAPGKKRELVAGISRDGSTDYIDSVKGRFTISRDNAKNSVYLQMNSLRAEDTAVYYCYAYRWITRYTYWGQGTLVTVSS

SEQ ID NO: 553 - protein, 117 aa, Artificial Sequence
  Description of Artificial Sequence: Synthetic polypeptide
EVQLVESGGGLVQPGGSLTLSCAASGSSVVFLSMAWYRQAPGKKRELVAGISADGSMDYIDSVKGRFTISRDNAKNSVYLQMNSLRAEDTAVYYCYAYRWRTRYTYWGQGTLVTVSS

SEQ ID NO: 554 - protein, 117 aa, Artificial Sequence
  Description of Artificial Sequence: Synthetic polypeptide
EVQLVESGGGLVQPGGSLTLSCAASGSSVRFLSMAWYRQAPGKKRELVAGISADGSTDYIDSVKGRFTISRDNAKNSVYLQMNSLRAEDTAVYYCYAYRWTRRYTYWGQGTLVTVSS

SEQ ID NO: 555 - protein, 117 aa, Artificial Sequence
  Description of Artificial Sequence: Synthetic polypeptide
EVQLVESGGGLVQPGGSLTLSCAASGSSVRFLSMAWYRQAPGKKRELVAGISADGSTDYIDSVKGRFTISRDNAKNSVYLQMNSLRAEDTAVYYCYAYSWTTRYTYWGQGTLVTVSS

SEQ ID NO: 556 - protein, 117 aa, Artificial Sequence
  Description of Artificial Sequence: Synthetic polypeptide
EVQLVESGGGLVQPGGSLTLSCAASGSSVRFLSMAWYRQAPGKKRELVAGISANGSTDYIDSVKGRFTISRDNAKNSVYLQMNSLRAEDTAVYYCYAYRWTNRYTYWGQGTLVTVSS

SEQ ID NO: 557 - protein, 117 aa, Artificial Sequence
  Description of Artificial Sequence: Synthetic polypeptide
EVQLVESGGGLVQPGGSLTLSCAASGSSVSRLSMAWYRQAPGKKRELVAGISANGSTTYIDSVKGRFTISRDNAKNSVYLQMNSLRAEDTAVYYCYAYRWTTRYRYWGQGTLVTVSS

SEQ ID NO: 558 - protein, 117 aa, Artificial Sequence
  Description of Artificial Sequence: Synthetic polypeptide
EVQLVESGGGLVQPGGSLTLSCAASGSSKSFLSMAWYRQAPGKKRELVAGISADGSTSYIDSVKGRFTISRDNAKNSVYLQMNSLRAEDTAVYYCYAYRWTTRYTYWGQGTLVTVSS

SEQ ID NO: 559 - protein, 117 aa, Artificial Sequence
  Description of Artificial Sequence: Synthetic polypeptide
EVQLVESGGGLVQPGGSLTLSCAASGSSVSRLSMAWYRQAPGKKRELVAGISADGSRDYIDSVKGRFTISRDNAKNSVYLQMNSLRAEDTAVYYCYAYRWTTRYKYWGQGTLVTVSS

SEQ ID NO: 560 - protein, 117 aa, Artificial Sequence
  Description of Artificial Sequence: Synthetic polypeptide
EVQLVESGGGLVQPGGSLTLSCAASGSSVKFLSMAWYRQAPGKKRELVAGISADGSTMYIDSVKGRFTISRDNAKNSVYLQMNSLRAEDTAVYYCYAYRWHTRYTYWGQGTLVTVSS

SEQ ID NO: 561 - protein, 117 aa, Artificial Sequence
  Description of Artificial Sequence: Synthetic polypeptide
EVQLVESGGGLVQPGGSLTLSCAASGSGVRFLSMAWYRQAPGKKRELVAGISPDGSTDYIDSVKGRFTISRDNAKNSVYLQMNSLRAEDTAVYYCYAYRWTRRYTYWGQGTLVTVSS

SEQ ID NO: 562 - protein, 117 aa, Artificial Sequence
  Description of Artificial Sequence: Synthetic polypeptide
EVQLVESGGGLVQPGGSLTLSCAASGSSVRFLSMAWYRQAPGKKRELVAGISGDGSTDYIDSVKGRFTISRDNAKNSVYLQMNSLRAEDTAVYYCYAYRWMTRYTYWGQGTLVTVSS

SEQ ID NO: 563 - protein, 117 aa, Artificial Sequence
  Description of Artificial Sequence: Synthetic polypeptide
EVQLVESGGGLVQPGGSLTLSCAASGSSVHFLSMAWYRQAPGKKRELVAGISRDGSTDYIDSVKGRFTISRDNAKNSVYLQMNSLRAEDTAVYYCYAYRWTTRYRYWGQGTLVTVSS

SEQ ID NO: 564 - protein, 117 aa, Artificial Sequence
  Description of Artificial Sequence: Synthetic polypeptide
EVQLVESGGGLVQPGGSLTLSCAASGSSVRFLSMAWYRQAPGKKRELVAGISRDGSTDYIDSVKGRFTISRDNAKNSVYLQMNSLRAEDTAVYYCYAYRWSTRYTYWGQGTLVTVSS

SEQ ID NO: 565 - protein, 117 aa, Artificial Sequence
  Description of Artificial Sequence: Synthetic polypeptide
EVQLVESGGGLVQPGGSLTLSCAASGSKVSFLSMAWYRQAPGKKRELVAGISRDGSTDYIDSVKGRFTISRDNAKNSVYLQMNSLRAEDTAVYYCYAYRWTTRYTFWGQGTLVTVSS

SEQ ID NO: 566 - protein, 117 aa, Artificial Sequence
  Description of Artificial Sequence: Synthetic polypeptide
EVQLVESGGGLVQPGGSLTLSCAASGSSVSFLSMAWYRQAPGKKRELVAGISADGSTDYIDSVKGRFTISRDNAKNSVYLQMNSLRAEDTAVYYCYAYRWRTRYTYWGQGTLVTVSS

SEQ ID NO: 567 - protein, 117 aa, Artificial Sequence
  Description of Artificial Sequence: Synthetic polypeptide
EVQLVESGGGLVQPGGSLTLSCAASGSKVSFLSMAWYRQAPGKKRELVAGISTDGSTDYIDSVKGRFTISRDNAKNSVYLQMNSLRAEDTAVYYCYAYRWTTRRTYWGQGTLVTVSS

SEQ ID NO: 568 - protein, 117 aa, Artificial Sequence
  Description of Artificial Sequence: Synthetic polypeptide
EVQLVESGGGLVQPGGSLTLSCAASGSRVSFLSMAWYRQAPGKKRELVAGISADGSTSYIDSVKGRFTISRDNAKNSVYLQMNSLRAEDTAVYYCYAYRWATRYTYWGQGTLVTVSS

SEQ ID NO: 569 - protein, 117 aa, Artificial Sequence
  Description of Artificial Sequence: Synthetic polypeptide
EVQLVESGGGLVQPGGSLTLSCAASGSRVSFLSMAWYRQAPGKKRELVAGISADGSTLYIDSVKGRFTISRDNAKNSVYLQMNSLRAEDTAVYYCYAYRWHTRYTYWGQGTLVTVSS

SEQ ID NO: 570 - protein, 117 aa, Artificial Sequence
  Description of Artificial Sequence: Synthetic polypeptide
EVQLVESGGGLVQPGGSLTLSCAASGSSVRFLSMAWYRQAPGKKRELVAGISRDGSTDYIDSVKGRFTISRDNAKNSVYLQMNSLRAEDTAVYYCYAYRWGTRYTYWGQGTLVTVSS

SEQ ID NO: 571 - protein, 117 aa, Artificial Sequence
  Description of Artificial Sequence: Synthetic polypeptide
EVQLVESGGGLVQPGGSLTLSCAASYSSVSRLSMAWYRQAPGKKRELVAGISADGSTVYIDSVKGRFTISRDNAKNSVYLQMNSLRAEDTAVYYCYAYRWTTRNTYWGQGTLVTVSS

SEQ ID NO: 572 - protein, 117 aa, Artificial Sequence
  Description of Artificial Sequence: Synthetic polypeptide
EVQLVESGGGLVQPGGSLTLSCAASGSSVSFLSMAWYRQAPGKKRELVAGISTDGSTDYIDSVKGRFTISRDNAKNSVYLQMNSLRAEDTAVYYCYAYRWRTRYTYWGQGTLVTVSS

SEQ ID NO: 573 - protein, 117 aa, Artificial Sequence
  Description of Artificial Sequence: Synthetic polypeptide
EVQLVESGGGLVQPGGSLTLSCAASGSSVSFLSMAWYRQAPGKKRELVAGISADGSTLYIDSVKGRFTISRDNAKNSVYLQMNSLRAEDTAVYYCYAYRWTTRYAYWGQGTLVTVSS

SEQ ID NO: 574 - protein, 117 aa, Artificial Sequence
  Description of Artificial Sequence: Synthetic polypeptide
EVQLVESGGGLVQPGGSLTLSCAASGSSVSFLSMAWYRQAPGKKRELVAGISADGRTDYIDSVKGRFTISRDNAKNSVYLQMNSLRAEDTAVYYCYAYRWRTRYTYWGQGTLVTVSS

SEQ ID NO: 575 - protein, 117 aa, Artificial Sequence
  Description of Artificial Sequence: Synthetic polypeptide
EVQLVESGGGLVQPGGSLTLSCVASGTSVSFLSMAWYRQAPGKKRELVAGISADGSTIYIDSVKGRFTISRDNAKNSVYLQMNSLRAEDTAVYYCYAYRWTTRRTYWGQGTLVTVSS

SEQ ID NO: 576 - protein, 117 aa, Artificial Sequence
  Description of Artificial Sequence: Synthetic polypeptide
EVQLVESGGGLVQPGGSLTLSCAASGSSVKFLSMAWYRQAPGKKRELVAGISADGSTLYIDSVKGRFTISRDNAKNSVYLQMNSLRAEDTAVYYCYAYRWTTRRTYWGQGTLVTVSS

SEQ ID NO: 577 - protein, 117 aa, Artificial Sequence
  Description of Artificial Sequence: Synthetic polypeptide
EVQLVESGGGLVQPGGSLTLSCAASGSSVSFLSMAWYRQAPGKKRELVAGISRDGSTDYIDSVKGRFTISRDNAKNSVYLQMNSLRAEDTAVYYCYAYRWTSRYTYWGQGTLVTVSS

SEQ ID NO: 578 - protein, 117 aa, Artificial Sequence
  Description of Artificial Sequence: Synthetic polypeptide
EVQLVESGGGLVQPGGSLTLSCAASGSRVSFLSMAWYRQAPGKKRELVAGISKDGSTDYIDSVKGRFTISRDNAKNSVYLQMNSLRAEDTAVYYCYAYRWTTRVTYWGQGTLVTVSS

SEQ ID NO: 579 - protein, 117 aa, Artificial Sequence
  Description of Artificial Sequence: Synthetic polypeptide
EVQLVESGGGLVQPGGSLTLSCAASGSSVSVLSMAWYRQAPGKKRELVAGISADGSTDYIGSVKGRFTISRDNAKNSVYLQMNSLRAEDTAVYYCYAYRWTTRTTYWGQGTLVTVSS

SEQ ID NO: 580 - protein, 117 aa, Artificial Sequence
  Description of Artificial Sequence: Synthetic polypeptide
EVQLVESGGGLVQPGGSLTLSCAASGSSVSFLSMAWYRQAPGKKRELVAGISVDGSTDYIDSVKGRFTISRDNAKNSVYLQMNSLRAEDTAVYYCYAYRWRTRYTYWGQGTLVTVSS

SEQ ID NO: 581 - protein, 117 aa, Artificial Sequence
  Description of Artificial Sequence: Synthetic polypeptide
EVQLVESGGGLVQPGGSLTLSCAASGSRVSFLSMAWYRQAPGKKRELVAGISADGSTGYIDSVKGRFTISRDNAKNSVYLQMNSLRAEDTAVYYCYAYRWATRYTYWGQGTLVTVSS

SEQ ID NO: 582 - protein, 117 aa, Artificial Sequence
  Description of Artificial Sequence: Synthetic polypeptide
EVQLVESGGGLVQPGGSLTLSCVASGSSVKFLSMAWYRQAPGKKRELVAGISGDGSTTYIDSVKGRFTISRDNAKNSVYLQMNSLRAEDTAVYYCYAYRWTTRRTYWGQGTLVTVSS

SEQ ID NO: 583 - protein, 117 aa, Artificial Sequence
  Description of Artificial Sequence: Synthetic polypeptide
EVQLVESGGGLVQPGGSLTLSCAASGSSVRFLSMAWYRQAPGKKRELVAGISTDGSTDYIDSVKGRFTISRDNAKNSVYLQMNSLRAEDTAVYYCYALRWTTRYTYWGQGTLVTVSS

SEQ ID NO: 584 - protein, 117 aa, Artificial Sequence
  Description of Artificial Sequence: Synthetic polypeptide
EVQLVESGGGLVQPGGSLTLSCAASGSSVSQLSMAWYRQAPGKKRELVAGISADGSTDYFDSVKGRFTISRDNAKNSVYLQMNSLRAEDTAVYYCYAYRWTTRGTYWGQGTLVTVSS

SEQ ID NO: 585 - protein, 117 aa, Artificial Sequence
  Description of Artificial Sequence: Synthetic polypeptide
EVQLVESGGGLVQPGGSLTLSCAASGSRVSFLSMAWYRQAPGKKRELVAGISADGSTSYIDSVKGRFTISRDNAKNSVYLQMNSLRAEDTAVYYCYAYRWRTRYTYWGQGTLVTVSS

SEQ ID NO: 586 - protein, 117 aa, Artificial Sequence
  Description of Artificial Sequence: Synthetic polypeptide
EVQLVESGGGLVQPGGSLTLSCAASKSSVSFLSMAWYRQAPGKKRELVAGISADGSTDYIDSVKGRFTISRDNAKNSVYLQMNSLRAEDTAVYYCYAYRWTTRATYWGQGTLVTVSS

SEQ ID NO: 587 - protein, 117 aa, Artificial Sequence
  Description of Artificial Sequence: Synthetic polypeptide
EVQLVESGGGLVQPGGSLTLSCAASGSSVSFLSMAWYRQAPGKKRELVAGISADGSTAYIDSVKGRFTISRDNAKNSVYLQMNSLRAEDTAVYYCYAYRWTTRRTYWGQGTLVTVSS

SEQ ID NO: 588 - protein, 117 aa, Artificial Sequence
  Description of Artificial Sequence: Synthetic polypeptide
EVQLVESGGGLVQPGGSLTLSCAASGSSVKFLSMAWYRQAPGKKRELVAGISADGSTVYIDSVKGRFTISRDNAKNSVYLQMNSLRAEDTAVYYCYAYRWPTRYTYWGQGTLVTVSS

SEQ ID NO: 589 - protein, 117 aa, Artificial Sequence
  Description of Artificial Sequence: Synthetic polypeptide
EVQLVESGGGLVQPGGSLTLSCAASGSSVRFLSMAWYRQAPGKKRELVAGISQDGSTDYIDSVKGRFTISRDNAKNSVYLQMNSLRAEDTAVYYCYAYRWRTRYTYWGQGTLVTVSS

SEQ ID NO: 590 - protein, 117 aa, Artificial Sequence
  Description of Artificial Sequence: Synthetic polypeptide
EVQLVESGGGLVQPGGSLTLSCAASGSSVRFLSMAWYRQAPGKKRELVAGISNDGSTDYIDSVKGRFTISRDNAKNSVYLQMNSLRAEDTAVYYCYAYRWKTRYTYWGQGTLVTVSS

SEQ ID NO: 591 - protein, 117 aa, Artificial Sequence
  Description of Artificial Sequence: Synthetic polypeptide
EVQLVESGGGLVQPGGSLTLSCAASGSRVSFLSMAWYRQAPGKKRELVAGISARGSTDYIDSVKGRFTISRDNAKNSVYLQMNSLRAEDTAVYYCYAYRWSTRYTYWGQGTLVTVSS

SEQ ID NO: 592 - protein, 117 aa, Artificial Sequence
  Description of Artificial Sequence: Synthetic polypeptide
EVQLVESGGGLVQPGGSLTLSCAASGSSVSFLSLAWYRQAPGKKRELVAGISADGSTDYIDSVKGRFTISRDNAKNSVYLQMNSLRAEDTAVYYCYAYRWKTRRTYWGQGTLVTVSS

SEQ ID NO: 593 - protein, 117 aa, Artificial Sequence
  Description of Artificial Sequence: Synthetic polypeptide
EVQLVESGGGLVQPGGSLTLSCAASGSSVRFLSMAWYRQAPGKKRELVAGISRDGSTDYIDSVKGRFTISRDNAKNSVYLQMNSLRAEDTAVYYCYAYRWTTRRTYWGQGTLVTVSS

SEQ ID NO: 594 - protein, 117 aa, Artificial Sequence
  Description of Artificial Sequence: Synthetic polypeptide
EVQLVESGGGLVQPGGSLTLSCAASGSKVSFLSMAWYRQAPGKKRELVAGISADGSTLYIDSVKGRFTISRDNAKNSVYLQMNSLRAEDTAVYYCYAYRWTTRYRYWGQGTLVTVSS

SEQ ID NO: 595 - protein, 117 aa, Artificial Sequence
  Description of Artificial Sequence: Synthetic polypeptide
EVQLVESGGGLVQPGGSLTLSCAASGSSVSFLSMAWYRQAPGKKRELVAGISADGSTNYIDSVKGRFTISRDNAKNSVYLQMNSLRAEDTAVYYCYAYRWRTRYTYWGQGTLVTVSS

SEQ ID NO: 596 - protein, 117 aa, Artificial Sequence
  Description of Artificial Sequence: Synthetic polypeptide
EVQLVESGGGLVQPGGSLTLSCAASGSSVRFLSMAWYRQAPGKKRELVAGISADGSTVYIDSVKGRFTISRDNAKNSVYLQMNSLRAEDTAVYYCYAYRWTTRYKYWGQGTLVTVSS

SEQ ID NO: 597 - protein, 117 aa, Artificial Sequence
  Description of Artificial Sequence: Synthetic polypeptide
EVQLVESGGGLVQPGGSLTLSCAASGSKVSFLSMAWYRQAPGKKRELVAGISADGSTTYIDSVKGRFTISRDNAKNSVYLQMNSLRAEDTAVYYCYAYRWKTRYTYWGQGTLVTVSS

SEQ ID NO: 598 - protein, 117 aa, Artificial Sequence
  Description of Artificial Sequence: Synthetic polypeptide
EVQLVESGGGLVQPGGSLTLSCAASGSSVKFLSMAWYRQAPGKKRELVAGISADGSTDYIGSVKGRFTISRDNAKNSVYLQMNSLRAEDTAVYYCYAYRWTTRVTYWGQGTLVTVSS

SEQ ID NO: 599 - protein, 117 aa, Artificial Sequence
  Description of Artificial Sequence: Synthetic polypeptide
EVQLVESGGGLVQPGGSLTLSCAASGSSVKFLSMAWYRQAPGKKRELVAGISRDGSTDYIDSVKGRFTISRDNAKNSVYLQMNSLRAEDTAVYYCYAYRWTTRFTYWGQGTLVTVSS

SEQ ID NO: 600 - protein, 117 aa, Artificial Sequence
  Description of Artificial Sequence: Synthetic polypeptide
EVQLVESGGGLVQPGGSLTLSCAASGSRVSFLSMAWYRQAPGKKRELVAGISADGSTTYIDSVKGRFTISRDNAKNSVYLQMNSLRAEDTAVYYCYAYRWTTRFTYWGQGTLVTVSS

SEQ ID NO: 601 - protein, 117 aa, Artificial Sequence
  Description of Artificial Sequence: Synthetic polypeptide
EVQLVESGGGLVQPGGSLTLSCAASGSSVLFLSMAWYRQAPGKKRELVAGVSSDGSTDYIDSVKGRFTISRDNAKNSVYLQMNSLRAEDTAVYYCYAYRWRTRYTYWGQGTLVTVSS

SEQ ID NO: 602 - protein, 117 aa, Artificial Sequence
  Description of Artificial Sequence: Synthetic polypeptide
EVQLVESGGGLVQPGGSLTLSCAASGSRVSFLSMAWYRQAPGKKRELVAGISADGHTDYIDSVKGRFTISRDNAKNSVYLQMNSLRAEDTAVYYCYAYRWTTRYTHWGQGTLVTVSS

SEQ ID NO: 603 - protein, 117 aa, Artificial Sequence
  Description of Artificial Sequence: Synthetic polypeptide
EVQLVESGGGLVQPGGSLTLSCAASGSRVSFLSMAWYRQAPGKKRELVAGISADGSTDYFDSVKGRFTISRDNAKNSVYLQMNSLRAEDTAVYYCYAYRWTRRYTYWGQGTLVTVSS

SEQ ID NO: 604 - protein, 117 aa, Artificial Sequence
  Description of Artificial Sequence: Synthetic polypeptide
EVQLVESGGGLVQPGGSLTLSCAASGSSVGFLSMAWYRQAPGKKRELVAGISADGSTVYIDSVKGRFTISRDNAKNSVYLQMNSLRAEDTAVYYCYAYRWTTRYTYWGQGTLVTVSS

SEQ ID NO: 605 - protein, 117 aa, Artificial Sequence
  Description of Artificial Sequence: Synthetic polypeptide
EVQLVESGGGLVQPGGSLTLSCAASGSSVSFMSMAWYRQAPGKKRELVAGISADGSTDYIASVKGRFTISRDNAKNSVYLQMNSLRAEDTAVYYCYAYRWTTRSTYWGQGTLVTVSS

SEQ ID NO: 606 - protein, 117 aa, Artificial Sequence
  Description of Artificial Sequence: Synthetic polypeptide
EVQLVESGGGLVQPGGSLTLSCAASGSSVSFLSMAWYRQAPGKKRELVAGISADGSTDYISSVKGRFTISRDNAKNSVYLQMNSLRAEDTAVYYCYAYSWTTRYTYWGQGTLVTVSS

SEQ ID NO: 607 - protein, 117 aa, Artificial Sequence
  Description of Artificial Sequence: Synthetic polypeptide
EVQLVESGGGLVQPGGSLTLSCAASGSSVTFLSMAWYRQAPGKKRELVAGISADGSTVYIDSVKGRFTISRDNAKNSVYLQMNSLRAEDTAVYYCYAYRWTTRGTYWGQGTLVTVSS

SEQ ID NO: 608 - protein, 117 aa, Artificial Sequence
  Description of Artificial Sequence: Synthetic polypeptide
EVQLVESGGGLVQPGGSLTLSCAASGSSVRFLSMAWYRQAPGKKRELVAGISADGSTVYIDSVKGRFTISRDNAKNSVYLQMNSLRAEDTAVYYCYAYRWKTRYTYWGQGTLVTVSS

SEQ ID NO: 609 - protein, 117 aa, Artificial Sequence
  Description of Artificial Sequence: Synthetic polypeptide
EVQLVESGGGLVQPGGSLTLSCAASGSKVSFLSMAWYRQAPGKKRELVAGISADGSTTYIDSVKGRFTISRDNAKNSVYLQMNSLRAEDTAVYYCYAYRWTTRFTYWGQGTLVTVSS

SEQ ID NO: 610 - protein, 117 aa, Artificial Sequence
  Description of Artificial Sequence: Synthetic polypeptide
EVQLVESGGGLVQPGGSLTLSCAASGSKVSFMSMAWYRQAPGKKRELVAGISVDGSTDYIDSVKGRFTISRDNAKNSVYLQMNSLRAEDTAVYYCYAYRWRTRYTYWGQGTLVTVSS

SEQ ID NO: 611 - protein, 117 aa, Artificial Sequence
  Description of Artificial Sequence: Synthetic polypeptide
EVQLVESGGGLVQPGGSLTLSCAASGSSVSNLSMAWYRQAPGKKRELVAGISADGSTAYIDSVKGRFTISRDNAKNSVYLQMNSLRAEDTAVYYCYAYRWTTRRTYWGQGTLVTVSS

SEQ ID NO: 612 - protein, 117 aa, Artificial Sequence
  Description of Artificial Sequence: Synthetic polypeptide
EVQLVESGGGLVQPGGSLTLSCAASNSSVSKLSMAWYRQAPGKKRELVAGISADGSTAYIDSVKGRFTISRDNAKNSVYLQMNSLRAEDTAVYYCYAYRWSTRYTYWGQGTLVTVSS

SEQ ID NO: 613 - protein, 117 aa, Artificial Sequence
  Description of Artificial Sequence: Synthetic polypeptide
EVQLVESGGGLVQPGGSLTLSCAASGSKVSFLSMAWYRQAPGKKRELVAGISADGSKDYIDSVKGRFTISRDNAKNSVYLQMNSLRAEDTAVYYCYAYRWTTRLTYWGQGTLVTVSS

SEQ ID NO: 614 - protein, 117 aa, Artificial Sequence
  Description of Artificial Sequence: Synthetic polypeptide
EVQLVESGGGLVQPGGSLTLSCVASGSQVSFLSMAWYRQAPGKKRELVAGISADGSTDYFDSVKGRFTISRDNAKNSVYLQMNSLRAEDTAVYYCYAYRWTRRYTYWGQGTLVTVSS

SEQ ID NO: 615 - protein, 117 aa, Artificial Sequence
  Description of Artificial Sequence: Synthetic polypeptide
EVQLVESGGGLVQPGGSLTLSCAASGSKVSFMSMAWYRQAPGKKRELVAGISADGSTDYIDSVKGRFTISRDNAKNSVYLQMNSLRAEDTAVYYCYAYRWTTRLTYWGQGTLVTVSS

SEQ ID NO: 616 - protein, 117 aa, Artificial Sequence
  Description of Artificial Sequence: Synthetic polypeptide
EVQLVESGGGLVQPGGSLTLSCAASGSRVSFLSMAWYRQAPGKKRELVAGISADGSTVYIDSVKGRFTISRDNAKNSVYLQMNSLRAEDTAVYYCYAYRWTRRYTYWGQGTLVTVSS

SEQ ID NO: 617 - protein, 117 aa, Artificial Sequence
  Description of Artificial Sequence: Synthetic polypeptide
EVQLVESGGGLVQPGGSLTLSCAASGSSVRFLSMAWYRQAPGKKRELVAGISADGSTVYIDSVKGRFTISRDNAKNSVYLQMNSLRAEDTAVYYCYAYRWTTRRTYWGQGTLVTVSS

SEQ ID NO: 618 - protein, 117 aa, Artificial Sequence
  Description of Artificial Sequence: Synthetic polypeptide
EVQLVESGGGLVQPGGSLTLSCAASGSKVSFLSMAWYRQAPGKKRELVAGISARGSTDYIDSVKGRFTISRDNAKNSVYLQMNSLRAEDTAVYYCYAYQWTTRYTYWGQGTLVTVSS

SEQ ID NO: 619 - protein, 117 aa, Artificial Sequence
  Description of Artificial Sequence: Synthetic polypeptide
EVQLVESGGGLVQPGGSLTLSCAASGSSVRFLSMAWYRQAPGKKRELVAGISATGSTDYIDSVKGRFTISRDNAKNSVYLQMNSLRAEDTAVYYCYAYRWTRRYTYWGQGTLVTVSS

SEQ ID NO: 620 - protein, 117 aa, Artificial Sequence
  Description of Artificial Sequence: Synthetic polypeptide
EVQLVESGGGLVQPGGSLTLSCAASGSSVSFLSIAWYRQAPGKKRELVAGISKDGSTDYIDSVKGRFTISRDNAKNSVYLQMNSLRAEDTAVYYCYAYRWTTRMTYWGQGTLVTVSS

SEQ ID NO: 621 - protein, 117 aa, Artificial Sequence
  Description of Artificial Sequence: Synthetic polypeptide
EVQLVESGGGLVQPGGSLTLSCAASGSSSSFLSMAWYRQAPGKKRELVAGISADGSTVYIDSVKGRFTISRDNAKNSVYLQMNSLRAEDTAVYYCYAYRWTTRRTYWGQGTLVTVSS

SEQ ID NO: 622 - protein, 117 aa, Artificial Sequence
  Description of Artificial Sequence: Synthetic polypeptide
EVQLVESGGGLVQPGGSLTLSCAASGSSVKFLSMAWYRQAPGKKRELVAGISPDGSTDYIDSVKGRFTISRDNAKNSVYLQMNSLRAEDTAVYYCYAYRWTTRYRYWGQGTLVTVSS

SEQ ID NO: 623 - protein, 117 aa, Artificial Sequence
  Description of Artificial Sequence: Synthetic polypeptide
EVQLVESGGGLVQPGGSLTLSCAASGSSVNFLSMAWYRQAPGKKRELVAGISADGSTHYIDSVKGRFTISRDNAKNSVYLQMNSLRAEDTAVYYCYAYRWLTRYTYWGQGTLVTVSS

SEQ ID NO: 624 - protein, 117 aa, Artificial Sequence
  Description of Artificial Sequence: Synthetic polypeptide
EVQLVESGGGLVQPGGSLTLSCAASGSSVKFLSMAWYRQAPGKKRELVAGISADGSTDYILSVKGRFTISRDNAKNSVYLQMNSLRAEDTAVYYCYAYEWTTRYTYWGQGTLVTVSS

SEQ ID NO: 625 - protein, 117 aa, Artificial Sequence
  Description of Artificial Sequence: Synthetic polypeptide
EVQLVESGGGLVQPGGSLTLSCAASGSSVSFLSMAWYRQAPGKKRELVAGISADGSTDYIHSVKGRFTISRDNAKNSVYLQMNSLRAEDTAVYYCYAYRWRTRYTYWGQGTLVTVSS

SEQ ID NO: 626 - protein, 117 aa, Artificial Sequence
  Description of Artificial Sequence: Synthetic polypeptide
EVQLVESGGGLVQPGGSLTLSCAASGSSVRFLSMAWYRQAPGKKRELVAGISVDGSTDYIDSVKGRFTISRDNAKNSVYLQMNSLRAEDTAVYYCYAYRWRTRYTYWGQGTLVTVSS

SEQ ID NO: 627 - protein, 117 aa, Artificial Sequence
  Description of Artificial Sequence: Synthetic polypeptide
EVQLVESGGGLVQPGGSLTLSCAASGSSVSFLSVAWYRQAPGKKRELVAGISRDGSTDYIDSVKGRFTISRDNAKNSVYLQMNSLRAEDTAVYYCYAYRWRTRYTYWGQGTLVTVSS

SEQ ID NO: 628 - protein, 117 aa, Artificial Sequence
  Description of Artificial Sequence: Synthetic polypeptide
EVQLVESGGGLVQPGGSLTLSCAASGSQVSFLSMAWYRQAPGKKRELVAGISADGSTVYIDSVKGRFTISRDNAKNSVYLQMNSLRAEDTAVYYCYAYRWSTRYTYWGQGTLVTVSS

SEQ ID NO: 629 - protein, 117 aa, Artificial Sequence
  Description of Artificial Sequence: Synthetic polypeptide
EVQLVESGGGLVQPGGSLTLSCAASGTSVSFLSMAWYRQAPGKKRELVAGISADGSTDYIRSVKGRFTISRDNAKNSVYLQMNSLRAEDTAVYYCYAYRWTTRLTYWGQGTLVTVSS

SEQ ID NO: 630 - protein, 117 aa, Artificial Sequence
  Description of Artificial Sequence: Synthetic polypeptide
EVQLVESGGGLVQPGGSLTLSCAASGSRVSFLSMAWYRQAPGKKRELVAGISADGSTMYIDSVKGRFTISRDNAKNSVYLQMNSLRAEDTAVYYCYAYRWTTRLTYWGQGTLVTVSS

SEQ ID NO: 631 - protein, 117 aa, Artificial Sequence
  Description of Artificial Sequence: Synthetic polypeptide
EVQLVESGGGLVQPGGSLTLSCAASGSSVKFLSMAWYRQAPGKKRELVAGISTDGSTDYIDSVKGRFTISRDNAKNSVYLQMNSLRAEDTAVYYCYAYKWTTRYTYWGQGTLVTVSS

SEQ ID NO: 632 - protein, 117 aa, Artificial Sequence
  Description of Artificial Sequence: Synthetic polypeptide
EVQLVESGGGLVQPGGSLTLSCAASGSSVSFLSSAWYRQAPGKKRELVAGISADGSTLYIDSVKGRFTISRDNAKNSVYLQMNSLRAEDTAVYYCYAYRWTTRSTYWGQGTLVTVSS

SEQ ID NO: 633 - protein, 117 aa, Artificial Sequence
  Description of Artificial Sequence: Synthetic polypeptide
EVQLVESGGGLVQPGGSLTLSCAASGSSVKFLSMAWYRQAPGKKRELVAGISADGSTDYIDSVKGRFTISRDNAKNSVYLQMNSLRAEDTAVYYCYAYRWRTRYTYWGQGTLVTVSS

SEQ ID NO: 634 - protein, 117 aa, Artificial Sequence
  Description of Artificial Sequence: Synthetic polypeptide
EVQLVESGGGLVQPGGSLTLSCAASGSSVSFLSMAWYRQAPGKKRELVAGISATGSTDYIDSVKGRFTISRDNAKNSVYLQMNSLRAEDTAVYYCYAYRWSTRYTYWGQGTLVTVSS

SEQ ID NO: 635 - protein, 117 aa, Artificial Sequence
  Description of Artificial Sequence: Synthetic polypeptide
EVQLVESGGGLVQPGGSLTLSCAASGSTVSFLSMAWYRQAPGKKRELVAGISHDGSTDYIDSVKGRFTISRDNAKNSVYLQMNSLRAEDTAVYYCYAYRWTTRYTYWGQGTLVTVSS

SEQ ID NO: 636 - protein, 117 aa, Artificial Sequence
  Description of Artificial Sequence: Synthetic polypeptide
EVQLVESGGGLVQPGGSLTLSCAASGSSVQFLSMAWYRQAPGKKRELVAGISYDGSTDYIDSVKGRFTISRDNAKNSVYLQMNSLRAEDTAVYYCYAYRWRTRYTYWGQGTLVTVSS

SEQ ID NO: 637 - protein, 117 aa, Artificial Sequence
  Description of Artificial Sequence: Synthetic polypeptide
EVQLVESGGGLVQPGGSLTLSCAASRSSVSFLSMAWYRQAPGKKRELVAGISTDGSTDYIDSVKGRFTISRDNAKNSVYLQMNSLRAEDTAVYYCYAYRWLTRYTYWGQGTLVTVSS

SEQ ID NO: 638 - protein, 117 aa, Artificial Sequence
  Description of Artificial Sequence: Synthetic polypeptide
EVQLVESGGGLVQPGGSLTLSCAASGSKVSFLSMAWYRQAPGKKRELVAGISADGSTAYIDSVKGRFTISRDNAKNSVYLQMNSLRAEDTAVYYCYAYRWRTRYTYWGQGTLVTVSS

SEQ ID NO: 639 - protein, 117 aa, Artificial Sequence
  Description of Artificial Sequence: Synthetic polypeptide
EVQLVESGGGLVQPGGSLTLSCAASGSRVSFLSMAWYRQAPGKKRELVAGISADGSTDYIESVKGRFTISRDNAKNSVYLQMNSLRAEDTAVYYCYAYRWTTRYTYWGQGTLVTVSS

SEQ ID NO: 640 - protein, 117 aa, Artificial Sequence
  Description of Artificial Sequence: Synthetic polypeptide
EVQLVESGGGLVQPGGSLTLSCAASGSSVSFLSMAWYRQAPGKKRELVAGISIDGSTDYIKSVKGRFTISRDNAKNSVYLQMNSLRAEDTAVYYCYAYRWTTRYRYWGQGTLVTVSS

SEQ ID NO: 641 - protein, 117 aa, Artificial Sequence
  Description of Artificial Sequence: Synthetic polypeptide
EVQLVESGGGLVQPGGSLTLSCAASGSKVSFLSMAWYRQAPGKKRELVAGISADGSKDYIDSVKGRFTISRDNAKNSVYLQMNSLRAEDTAVYYCYAYRWTTRYTYWGQGTLVTVSS

SEQ ID NO: 642 - protein, 117 aa, Artificial Sequence
  Description of Artificial Sequence: Synthetic polypeptide
EVQLVESGGGLVQPGGSLTLSCAASGSSVRFLSMAWYRQAPGKKRELVAGISADGSTVYIDSVKGRFTISRDNAKNSVYLQMNSLRAEDTAVYYCYAYRWPTRYTYWGQGTLVTVSS

SEQ ID NO: 643 - protein, 117 aa, Artificial Sequence
  Description of Artificial Sequence: Synthetic polypeptide
EVQLVESGGGLVQPGGSLTLSCAASGSSVKFLSMAWYRQAPGKKRELVAGISRDGSTDYIDSVKGRFTISRDNAKNSVYLQMNSLRAEDTAVYYCYAYRWTTRHTYWGQGTLVTVSS

SEQ ID NO: 644 - protein, 117 aa, Artificial Sequence
  Description of Artificial Sequence: Synthetic polypeptide
EVQLVESGGGLVQPGGSLTLSCAASGSSVKFLSMAWYRQAPGKKRELVAGISADGSTDYIHSVKGRFTISRDNAKNSVYLQMNSLRAEDTAVYYCYAYRWTRRYTYWGQGTLVTVSS

SEQ ID NO: 645 - protein, 117 aa, Artificial Sequence
  Description of Artificial Sequence: Synthetic polypeptide
EVQLVESGGGLVQPGGSLTLSCAASGSSVSILSMAWYRQAPGKKRELVAGISADGSTIYIDSVKGRFTISRDNAKNSVYLQMNSLRAEDTAVYYCYAYRWHTRYTYWGQGTLVTVSS

SEQ ID NO: 646 - protein, 117 aa, Artificial Sequence
  Description of Artificial Sequence: Synthetic polypeptide
EVQLVESGGGLVQPGGSLTLSCAASGSSVSFLSVAWYRQAPGKKRELVAGISANGSTDYIDSVKGRFTISRDNAKNSVYLQMNSLRAEDTAVYYCYAYRWTNRYTYWGQGTLVTVSS

SEQ ID NO: 647 - protein, 117 aa, Artificial Sequence
  Description of Artificial Sequence: Synthetic polypeptide
EVQLVESGGGLVQPGGSLTLSCAASGSSVRFLSMAWYRQAPGKKRELVAGISTDGSTDYIDSVKGRFTISRDNAKNSVYLQMNSLRAEDTAVYYCYAYRWTTRYRYWGQGTLVTVSS

SEQ ID NO: 648 - protein, 117 aa, Artificial Sequence
  Description of Artificial Sequence: Synthetic polypeptide
EVQLVESGGGLVQPGGSLTLSCAASGSRVSFLSMAWYRQAPGKKRELVAGISYDGSTDYIDSVKGRFTISRDNAKNSVYLQMNSLRAEDTAVYYCYAYRWTTRRTYWGQGTLVTVSS

SEQ ID NO: 649 - protein, 117 aa, Artificial Sequence
  Description of Artificial Sequence: Synthetic polypeptide
EVQLVESGGGLVQPGGSLTLSCAASGHSVSFLSMAWYRQAPGKKRELVAGISADGSTDYIASVKGRFTISRDNAKNSVYLQMNSLRAEDTAVYYCYAYRWSTRYTYWGQGTLVTVSS

SEQ ID NO: 650 - protein, 117 aa, Artificial Sequence
  Description of Artificial Sequence: Synthetic polypeptide
EVQLVESGGGLVQPGGSLTLSCAASGSSVRFLSMAWYRQAPGKKRELVAGISADGSTDYIGSVKGRFTISRDNAKNSVYLQMNSLRAEDTAVYYCYAYRWSTRYTYWGQGTLVTVSS

SEQ ID NO: 651 - protein, 117 aa, Artificial Sequence
  Description of Artificial Sequence: Synthetic polypeptide
EVQLVESGGGLVQPGGSLTLSCAASGSSVSFLSMAWYRQAPGKKRELVAGISANGSTDYYDSVKGRFTISRDNAKNSVYLQMNSLRAEDTAVYYCYAYRWRTRYTYWGQGTLVTVSS

SEQ ID NO: 652 - protein, 117 aa, Artificial Sequence
  Description of Artificial Sequence: Synthetic polypeptide
EVQLVESGGGLVQPGGSLTLSCAASGSRVSFLSMAWYRQAPGKKRELVAGISADGSTSYIDSVKGRFTISRDNAKNSVYLQMNSLRAEDTAVYYCYAYRWTTRYTYWGQGTLVTVSS

SEQ ID NO: 653 - protein, 117 aa, Artificial Sequence
  Description of Artificial Sequence: Synthetic polypeptide
EVQLVESGGGLVQPGGSLTLSCAASGSSVKFLSMAWYRQAPGKKRELVAGVSADGSTDYIDSVKGRFTISRDNAKNSVYLQMNSLRAEDTAVYYCYAYEWTTRYTYWGQGTLVTVSS

SEQ ID NO: 654 - protein, 117 aa, Artificial Sequence
  Description of Artificial Sequence: Synthetic polypeptide
EVQLVESGGGLVQPGGSLTLSCAASGSSVSRLSMAWYRQAPGKKRELVAGISARGSTDYIDSVKGRFTISRDNAKNSVYLQMNSLRAEDTAVYYCYAYRWTTRSTYWGQGTLVTVSS

SEQ ID NO: 655 - protein, 117 aa, Artificial Sequence
  Description of Artificial Sequence: Synthetic polypeptide
EVQLVESGGGLVQPGGSLTLSCAASGRSVSFLSMAWYRQAPGKKRELVAGISADGSTIYIDSVKGRFTISRDNAKNSVYLQMNSLRAEDTAVYYCYAYRWTTRYTYWGQGTLVTVSS

SEQ ID NO: 656 - protein, 117 aa, Artificial Sequence
  Description of Artificial Sequence: Synthetic polypeptide
EVQLVESGGGLVQPGGSLTLSCAASGRSVSFLSMAWYRQAPGKKRELVAGISANGSTDYIDSVKGRFTISRDNAKNSVYLQMNSLRAEDTAVYYCYAYRWSTRYTYWGQGTLVTVSS

SEQ ID NO: 657 - protein, 117 aa, Artificial Sequence
  Description of Artificial Sequence: Synthetic polypeptide
EVQLVESGGGLVQPGGSLTLSCAASGSSVKFLSMAWYRQAPGKKRELVAGISADGSTDYVDSVKGRFTISRDNAKNSVYLQMNSLRAEDTAVYYCYAYRWSTRYTYWGQGTLVTVSS

SEQ ID NO: 658 - protein, 117 aa, Artificial Sequence
  Description of Artificial Sequence: Synthetic polypeptide
EVQLVESGGGLVQPGGSLTLSCAASGSSVSKLSMAWYRQAPGKKRELVAGISADGSTDYRDSVKGRFTISRDNAKNSVYLQMNSLRAEDTAVYYCYAYRWTYRYTYWGQGTLVTVSS

SEQ ID NO: 659 - protein, 117 aa, Artificial Sequence
  Description of Artificial Sequence: Synthetic polypeptide
EVQLVESGGGLVQPGGSLTLSCAASGSSVSRLSMAWYRQAPGKKRELVAGISVDGSTDYIDSVKGRFTISRDNAKNSVYLQMNSLRAEDTAVYYCYAYRWTTRLTYWGQGTLVTVSS

SEQ ID NO: 660 - protein, 117 aa, Artificial Sequence
  Description of Artificial Sequence: Synthetic polypeptide
EVQLVESGGGLVQPGGSLTLSCAASGSSVKFLSLAWYRQAPGKKRELVAGISADGSTDYILSVKGRFTISRDNAKNSVYLQMNSLRAEDTAVYYCYAYEWTTRYTYWGQGTLVTVSS

SEQ ID NO: 661 - protein, 117 aa, Artificial Sequence
  Description of Artificial Sequence: Synthetic polypeptide
EVQLVESGGGLVQPGGSLTLSCAASGSSVSRLSLAWYRQAPGKKRELVAGISVDGSTDYIDSVKGRFTISRDNAKNSVYLQMNSLRAEDTAVYYCYAYRWTTRLTYWGQGTLVTVSS

SEQ ID NO: 662 - protein, 119 aa, Artificial Sequence
  Description of Artificial Sequence: Synthetic polypeptide
EVQLVESGGGLVQPGGSLTLSCVASGTSSSINAMGWYRRAPGKQRELVAGISSDGSKVFNESVKGRFTISRDNAKNSVYLQMNSLRAEDTAVYYCYYFRPAAGSPMRYWGQGTLVTVSS

SEQ ID NO: 663 - protein, 119 aa, Artificial Sequence
  Description of Artificial Sequence: Synthetic polypeptide
EVQLVESGGGLVQPGGSLTLSCVASGTTSSINAIGWYRRAPGKQRELVAGISSDGSEVYTDSVKGRFTISRDNAKNSVYLQMNSLRAEDTAVYYCYYFRTVDGSPLRYWGQGTLVTVSS

SEQ ID NO: 664 - protein, 119 aa, Artificial Sequence
  Description of Artificial Sequence: Synthetic polypeptide
EVQLVESGGGLVQPGGSLTLSCVASGSTSSINAMAWYRRAPGKQRELVAGISSDDSNVYYESVKGRFTISRDNAKNSVYLQMNSLRAEDTAVYYCYYFRTVSGSSKRYWGQGTLVTVSS

SEQ ID NO: 665 - protein, 119 aa, Artificial Sequence
  Description of Artificial Sequence: Synthetic polypeptide
EVQLVESGGGLVQPGGSLTLSCVASGQTYRVNAFGWYRRAPGKQRELVAGISSDGSKVYADSVKGRFTISRDNAKNSVYLQMNSLRAEDTAVYYCYYFSAGSGTEMSYWGQGTLVTVSS

SEQ ID NO: 666 - protein, 119 aa, Artificial Sequence
  Description of Artificial Sequence: Synthetic polypeptide
EVQLVESGGGLVQPGGSLTLSCVASGSTSSINAMAWYRRAPGKQRELVAGISSDESTLYVDSVKGRFTISRDNAKNSVYLQMNSLRAEDTAVYYCYYFGSLSGSSTTYWGQGTLVTVSS

SEQ ID NO: 667 - protein, 119 aa, Artificial Sequence
  Description of Artificial Sequence: Synthetic polypeptide
EVQLVESGGGLVQPGGSLTLSCVASGSASLTNATGWYRRAPGKQRELVAGISSDDSKVYSDSVKGRFTISRDNAKNSVYLQMNSLRAEDTAVYYCYYFGSVSGSWTRYWGQGTLVTVSS

SEQ ID NO: 668 - protein, 119 aa, Artificial Sequence
  Description of Artificial Sequence: Synthetic polypeptide
EVQLVESGGGLVQPGGSLTLSCVASGYPSLNNAMGWYRRAPGKQRELVAGISSDGSQVYGASVKGRFTISRDNAKNSVYLQMNSLRAEDTAVYYCYYFRLVSGSSMSYWGQGTLVTVSS

SEQ ID NO: 669 - protein, 119 aa, Artificial Sequence
  Description of Artificial Sequence: Synthetic polypeptide
EVQLVESGGGLVQPGGSLTLSCVASGSSSTINAIGWYRRAPGKQRELVAGISSDGSKVYADSVKGRFTISRDNAKNSVYLQMNSLRAEDTAVYYCYYFRTGSGTSKSYWGQGTLVTVSS

SEQ ID NO: 670 - protein, 119 aa, Artificial Sequence
  Description of Artificial Sequence: Synthetic polypeptide
EVQLVESGGGLVQPGGSLTLSCVASGSTSYINAMGWYRRAPGKQRELVAGISSDGSNMYADSVKGRFTISRDNAKNSVYLQMNSLRAEDTAVYYCYYFSNMSGTTRRYWGQGTLVTVSS

SEQ ID NO: 671 - protein, 119 aa, Artificial Sequence
  Description of Artificial Sequence: Synthetic polypeptide
EVQLVESGGGLVQPGGSLTLSCVASGSTSSVNALGWYRRAPGKQRELVAGISSDGSKVYTDSVKGRFTISRDNAKNSVYLQMNSLRAEDTAVYYCYYFRTVPGSAMGYWGQGTLVTVSS

SEQ ID NO: 672 - protein, 119 aa, Artificial Sequence
  Description of Artificial Sequence: Synthetic polypeptide
EVQLVESGGGLVQPGGSLTLSCVASGSTSLSNAVGWYRRAPGKQRELVAGISSDGSKVSAESVKGRFTISRDNAKNSVYLQMNSLRAEDTAVYYCYYFRAESGSSMGYWGQGTLVTVSS

SEQ ID NO: 673 - protein, 119 aa, Artificial Sequence
  Description of Artificial Sequence: Synthetic polypeptide
EVQLVESGGGLVQPGGSLTLSCVASGSTSSTNAIGWYRRAPGKQRELVAGISSDGSKVYDDSVKGRFTISRDNAKNSVYLQMNSLRAEDTAVYYCYYFRTLYGSSRSYWGQGTLVTVSS

SEQ ID NO: 674 - protein, 119 aa, Artificial Sequence
  Description of Artificial Sequence: Synthetic polypeptide
EVQLVESGGGLVQPGGSLTLSCVASGLTSTINAMGWYRRAPGKQRELVAGISSDGSKVYDDSVKGRFTISRDNAKNSVYLQMNSLRAEDTAVYYCYYFSPFSGSDTGYWGQGTLVTVSS

SEQ ID NO: 675 - protein, 119 aa, Artificial Sequence
  Description of Artificial Sequence: Synthetic polypeptide
EVQLVESGGGLVQPGGSLTLSCVASGVSPSKNAIGWYRRAPGKQRELVAGISSDGSAVYVGSVKGRFTISRDNAKNSVYLQMNSLRAEDTAVYYCYYFSTFSGSSISYWGQGTLVTVSS

SEQ ID NO: 676 - protein, 119 aa, Artificial Sequence
  Description of Artificial Sequence: Synthetic polypeptide
EVQLVESGGGLVQPGGSLTLSCVASGSTSSINAVGWYRRAPGKQRELVAGISSDGSYVYSESVKGRFTISRDNAKNSVYLQMNSLRAEDTAVYYCYYFRTLAGSEMRYWGQGTLVTVSS

SEQ ID NO: 677 - protein, 119 aa, Artificial Sequence
  Description of Artificial Sequence: Synthetic polypeptide
EVQLVESGGGLVQPGGSLTLSCVASGSTTMNNAMAWYRRAPGKQRELVAGISSDSSHVYADSVKGRFTISRDNAKNSVYLQMNSLRAEDTAVYYCYYFRTVSGSGVRYWGQGTLVTVSS

SEQ ID NO: 678 - protein, 119 aa, Artificial Sequence
  Description of Artificial Sequence: Synthetic polypeptide
EVQLVESGGGLVQPGGSLTLSCVASGSTSKINAIGWYRRAPGKQRELVAGISSDSSIVYTDSVKGRFTISRDNAKNSVYLQMNSLRAEDTAVYYCYYFRPGAGHSNSYWGQGTLVTVSS

SEQ ID NO: 679 - protein, 119 aa, Artificial Sequence
  Description of Artificial Sequence: Synthetic polypeptide
EVQLVESGGGLVQPGGSLTLSCVASGQTTALNAMGWYRRAPGKQRELVAGISSDGSEVNTDSVKGRFTISRDNAKNSVYLQMNSLRAEDTAVYYCYYFRRASGTAMSYWGQGTLVTVSS

SEQ ID NO: 680 - protein, 119 aa, Artificial Sequence
  Description of Artificial Sequence: Synthetic polypeptide
EVQLVESGGGLVQPGGSLTLSCVASGATSSINAIGWYRRAPGKQRELVAGISSDGSKLSSDSVKGRFTISRDNAKNSVYLQMNSLRAEDTAVYYCYYFTSASGTDLSYWGQGTLVTVSS

SEQ ID NO: 681 - protein, 119 aa, Artificial Sequence
  Description of Artificial Sequence: Synthetic polypeptide
EVQLVESGGGLVQPGGSLTLSCVASGSTSTINAMGWYRRAPGKQRELVAGISSDNSKVYADSVKGRFTISRDNAKNSVYLQMNSLRAEDTAVYYCYYFRSANGSSKRYWGQGTLVTVSS

SEQ ID NO: 682 - protein, 119 aa, Artificial Sequence
  Description of Artificial Sequence: Synthetic polypeptide
EVQLVESGGGLVQPGGSLTLSCVASGSTSSINAMGWYRRAPGKQRELVAGISSDGSRVYFDSVKGRFTISRDNAKNSVYLQMNSLRAEDTAVYYCYYFKTIAGAGMRYWGQGTLVTVSS

SEQ ID NO: 683 - protein, 119 aa, Artificial Sequence
  Description of Artificial Sequence: Synthetic polypeptide
EVQLVESGGGLVQPGGSLTLSCVASGSTSLVNAMGWYRRAPGKQRELVAGISSDGSLVYAESVKGRFTISRDNAKNSVYLQMNSLRAEDTAVYYCYYFRYGSGSSLSYWGQGTLVTVSS

SEQ ID NO: 684 - protein, 119 aa, Artificial Sequence
  Description of Artificial Sequence: Synthetic polypeptide
EVQLVESGGGLVQPGGSLTLSCVASGSTSLNNAIGWYRRAPGKQRELVAGISSDGSVVYVDSVKGRFTISRDNAKNSVYLQMNSLRAEDTAVYYCYYFRTVPGASMKYWGQGTLVTVSS

SEQ ID NO: 685 - protein, 119 aa, Artificial Sequence
  Description of Artificial Sequence: Synthetic polypeptide
EVQLVESGGGLVQPGGSLTLSCVASGSTSPVNAMAWYRRAPGKQRELVAGISSDGSKVYVDSVKGRFTISRDNAKNSVYLQMNSLRAEDTAVYYCYYFRTVDGSAISYWGQGTLVTVSS

SEQ ID NO: 686 - protein, 119 aa, Artificial Sequence
  Description of Artificial Sequence: Synthetic polypeptide
EVQLVESGGGLVQPGGSLTLSCVASGTTSSMNAIGWYRRAPGKQRELVAGISSDGSKLYDESVKGRFTISRDNAKNSVYLQMNSLRAEDTAVYYCYYFRTVKGSGGSYWGQGTLVTVSS

SEQ ID NO: 687 - protein, 119 aa, Artificial Sequence
  Description of Artificial Sequence: Synthetic polypeptide
EVQLVESGGGLVQPGGSLTLSCVASGETSSINAMAWYRRAPGKQRELVAGISSDYSKLYADSVKGRFTISRDNAKNSVYLQMNSLRAEDTAVYYCYYFRTVSGSSRGYWGQGTLVTVSS

SEQ ID NO: 688 - protein, 119 aa, Artificial Sequence
  Description of Artificial Sequence: Synthetic polypeptide
EVQLVESGGGLVQPGGSLTLSCVASGSTSTINAIGWYRRAPGKQRELVAGISSDSSKVYTESVKGRFTISRDNAKNSVYLQMNSLRAEDTAVYYCYYFRPGPGSQMAYWGQGTLVTVSS

SEQ ID NO: 689 - protein, 119 aa, Artificial Sequence
  Description of Artificial Sequence: Synthetic polypeptide
EVQLVESGGGLVQPGGSLTLSCVASGSTYSMNAMGWYRRAPGKQRELVAGISSDGSQVYVDSVKGRFTISRDNAKNSVYLQMNSLRAEDTAVYYCYYFRTVAGSASGYWGQGTLVTVSS

SEQ ID NO: 690 - protein, 119 aa, Artificial Sequence; identical to SEQ ID NO: 521
  Description of Artificial Sequence: Synthetic polypeptide

SEQ ID NO: 691 - protein, 119 aa, Artificial Sequence
  Description of Artificial Sequence: Synthetic polypeptide
EVQLVESGGGLVQPGGSLTLSCVASGSTSTINAIGWYRRAPGKQRELVAGISSDGSKVYVDSVKGRFTISRDNAKNSVYLQMNSLRAEDTAVYYCYYFINLKGSSMAYWGQGTLVTVSS

SEQ ID NO: 692 - protein, 119 aa, Artificial Sequence
  Description of Artificial Sequence: Synthetic polypeptide
EVQLVESGGGLVQPGGSLTLSCVASGSTSSINAIGWYRRAPGKQRELVAGISSDGSKVYADSVKGRFTISRDNAKNSVYLQMNSLRAEDTAVYYCYYFRMVTGSYGGYWGQGTLVTVSS

SEQ ID NO: 693 - protein, 119 aa, Artificial Sequence
  Description of Artificial Sequence: Synthetic polypeptide
EVQLVESGGGLVQPGGSLTLSCVASGSISSINAMGWYRRAPGKQRELVAGISSDGSSVYADSVKGRFTISRDNAKNSVYLQMNSLRAEDTAVYYCYYFKSSYGLPMRYWGQGTLVTVSS

SEQ ID NO: 694 - protein, 119 aa, Artificial Sequence
  Description of Artificial Sequence: Synthetic polypeptide
EVQLVESGGGLVQPGGSLTLSCVASGSTQVNNAMAWYRRAPGKQRELVAGISSDGSQVYYGSVKGRFTISRDNAKNSVYLQMNSLRAEDTAVYYCYYFKTVSGQSLRYWGQGTLVTVSS

SEQ ID NO: 695 - protein, 119 aa, Artificial Sequence
  Description of Artificial Sequence: Synthetic polypeptide
EVQLVESGGGLVQPGGSLTLSCVASGSTASFNAMAWYRRAPGKQRELVAGISSDGSKVYTDSVKGRFTISRDNAKNSVYLQMNSLRAEDTAVYYCYYFRTVTGRAARYWGQGTLVTVSS

SEQ ID NO: 696 - protein, 119 aa, Artificial Sequence
  Description of Artificial Sequence: Synthetic polypeptide
EVQLVESGGGLVQPGGSLTLSCVASGSPLSINAIGWYRRAPGKQRELVAGISSDGSKVSADSVKGRFTISRDNAKNSVYLQMNSLRAEDTAVYYCYYFGPAIGASRTYWGQGTLVTVSS

SEQ ID NO: 697 - protein, 119 aa, Artificial Sequence
  Description of Artificial Sequence: Synthetic polypeptide
EVQLVESGGGLVQPGGSLTLSCVASGSTTFINAIGWYRRAPGKQRELVAGISSDGSKVYEDSVKGRFTISRDNAKNSVYLQMNSLRAEDTAVYYCYYFRTVSGAPKSYWGQGTLVTVSS

SEQ ID NO: 698 - protein, 119 aa, Artificial Sequence
  Description of Artificial Sequence: Synthetic polypeptide
EVQLVESGGGLVQPGGSLTLSCVASGSTSSINAIGWYRRAPGKQRELVAGISSDRSKVYADSVKGRFTISRDNAKNSVYLQMNSLRAEDTAVYYCYYFHTVSGSSMSYWGQGTLVTVSS

SEQ ID NO: 699 - protein, 119 aa, Artificial Sequence
  Description of Artificial Sequence: Synthetic polypeptide
EVQLVESGGGLVQPGGSLTLSCVASGETDTINAVGWYRRAPGKQRELVAGISSDGSKVYAESVKGRFTISRDNAKNSVYLQMNSLRAEDTAVYYCYYFRRLEGYSNRYWGQGTLVTVSS

SEQ ID NO: 700 - protein, 119 aa, Artificial Sequence
  Description of Artificial Sequence: Synthetic polypeptide
EVQLVESGGGLVQPGGSLTLSCVASGSTSPINAIGWYRRAPGKQRELVAGISSDGSVVTTESVKGRFTISRDNAKNSVYLQMNSLRAEDTAVYYCYYFRTGSGSSMGYWGQGTLVTVSS

SEQ ID NO: 701 - protein, 119 aa, Artificial Sequence
  Description of Artificial Sequence: Synthetic polypeptide
EVQLVESGGGLVQPGGSLTLSCVASGSITSSNAMGWYRRAPGKQRELVAGISSDGSHVHQESVKGRFTISRDNAKNSVYLQMNSLRAEDTAVYYCYYFTTVTGSSMSYWGQGTLVTVSS

SEQ ID NO: 702 - protein, 117 aa, Artificial Sequence
  Description of Artificial Sequence: Synthetic polypeptide
EVQLVESGGGLVQPGGSLTLSCAASRYSVSNLSMAWYRQAPGKKRELVAGISADGSTVYVESVKGRFTISRDNAKNSVYLQMNSLRAEDTAVYYCYAYYWTERRPYWGQGTLVTVSS

SEQ ID NO: 703 - protein, 117 aa, Artificial Sequence
  Description of Artificial Sequence: Synthetic polypeptide
EVQLVESGGGLVQPGDSLTLSCAASMSTVSVLSMAWYRQAPGKKRELVAGISSDGSTVYIDSVKGRFTISRDNAKNSVYLQMNSLRAEDTAIYYCYAYSWDDAHPYWGQGTLVTVSS

SEQ ID NO: 704 - protein, 117 aa, Artificial Sequence
  Description of Artificial Sequence: Synthetic polypeptide
EVQLVESGGGLVQPGGSLTLSCAASDSYVSLLSMAWYRQAPGKKRELVAGISVDGSTHYVASVKGRFTISRDNAKNSVYLQMNSLRAEDTAVYYCYAYRWMTRLTYWGQGTLVTVSS

SEQ ID NO: 705 - protein, 117 aa, Artificial Sequence
  Description of Artificial Sequence: Synthetic polypeptide
EVQLVESGGGLVQPGGSLTLSCAASDSAVSVLSIAWYRQAPGKKRELVAGISTDGSKHYIDSVKGRFTISRDNAKNSVYLQMNSLRAEDTAVYYCYAYDWADAQPYWGQGTLVTVSS

SEQ ID NO: 706 - protein, 117 aa, Artificial Sequence
  Description of Artificial Sequence: Synthetic polypeptide
EVQLVESGGGLVQPGGSLTLSCAASHSSVTSLSLAWYRQAPGKKRELVAGISYDGSKYYAESVKGRFTISRDNAKNSVYLQMNSLRAEDTAVYYCYAYSWTDRLPYWGQGTLVTVSS

SEQ ID NO: 707 - protein, 117 aa, Artificial Sequence
  Description of Artificial Sequence: Synthetic polypeptide
EVQLVESGGGLVQPGGSLTLSCAASDSVVKFLSMAWYRQAPGKKRELVAGISANGSRTYMESVKGRFTISRDNAKNSVYLQMNSLRAEDTAVYYCYAYRWATRLPYWGQGTLVTVSS

SEQ ID NO: 708 - protein, 117 aa, Artificial Sequence
  Description of Artificial Sequence: Synthetic polypeptide
EVQLVESGGGLVQPGGSLTLSCAASDPSVWNLSMAWYRQAPGKKRELVAGISPDGSTDYVDSVKGRFTISRDNAKNSVYLQMNSLRAEDTAVYYCYAYKWSNRLPYWGQGTLVTVSS

SEQ ID NO: 709 - protein, 117 aa, Artificial Sequence
  Description of Artificial Sequence: Synthetic polypeptide
EVQLVESGGGLVQPGGSLTLSCAASGTSVMLLSLAWYRQAPGKKRELVAGISPNGSAVYTESVKGRFTISRDNAKNSVYLQMNSLRAEDTAVYYCYAYGWKTRQPYWGQGTLVTVSS

SEQ ID NO: 710 - protein, 117 aa, Artificial Sequence
  Description of Artificial Sequence: Synthetic polypeptide
EVQLVESGGGLVQPGGSLTLSCAASSSPVSNLSLAWYRQAPGKKRELVAGISPDGSTAYMESVKGRFTISRDNAKNSVYLQMNSLRAEDTAVYYCYAYRWPNRRGYWGQGTLVTVSS

SEQ ID NO: 711 - protein, 117 aa, Artificial Sequence
  Description of Artificial Sequence: Synthetic polypeptide
EVQLVESGGGLVQPGGSLTLSCAASWRSVLLLSVAWYRQAPGKKRELVAGISNDGSTDYIDSVKGRFTISRDNAKNSVYLQMNSLRAEDTAVYYCYAYDWTTRQRYWGQGTLVTVSS

SEQ ID NO: 712 - protein, 117 aa, Artificial Sequence
  Description of Artificial Sequence: Synthetic polypeptide
EVQLVESGGGLVQPGGSLTLSCAASSSSVQYLSMAWYRQAPGKKRELVAGISTDGSAVYFDSVKGRFTISRDNAKNSVYLQMNSLRAEDTAVYYCYAYNWSYAQPYWGQGTLVTVSS

SEQ ID NO: 713 - protein, 117 aa, Artificial Sequence
  Description of Artificial Sequence: Synthetic polypeptide
EVQLVESGGGLVQPGGSLTLSCAASGTSVSLLSLAWYRQAPGKKRELVAGISTGGSTHYIESVKGRFTISRDNAKNSVYLQMNSLRAEDTAVYYCYAYNWTDSLQYWGQGTLVTVSS

SEQ ID NO: 714 - protein, 117 aa, Artificial Sequence
  Description of Artificial Sequence: Synthetic polypeptide
EVQLVESGGGLVQPGGSLTLSCAASLSSVSNLSIAWYRQAPGKKRELVAGISTDGSTVYIDSVKGRFTISRDNAKNSVYLQMNSLRAEDTAVYYCYAYSWTTSLPYWGQGTLVTVSS

SEQ ID NO: 715 - protein, 117 aa, Artificial Sequence
  Description of Artificial Sequence: Synthetic polypeptide
EVQLVESGGGLVQPGGSLTLSCAASMYSVSFLSMAWYRQAPGKKRELVAGISNEGSTYYMDSVKGRFTISRDNAKNSVYLQMNSLRAEDTAVYYCYAYKWRSRSTYWGQGTLVTVSS

SEQ ID NO: 716 - protein, 117 aa, Artificial Sequence
  Description of Artificial Sequence: Synthetic polypeptide
EVQLVESGGGLVQPGGSLTLSCAASKSSVSHLSLAWYRQAPGKKRELVAGISADGSHVYTNSVKGRFTISRDNAKNSVYLQMNSLRAEDTAVYYCYAYSQTTRDPYWGQGTLVTVSS

SEQ ID NO: 717 - protein, 117 aa, Artificial Sequence
  Description of Artificial Sequence: Synthetic polypeptide
EVQLVESGGGLVQPGGSLTLSCAASYTSVLDLSIAWYRQAPGKKRELVAGISDDGSRYYTDSVKGRFTISRDNAKNSVYLQMNSLRAEDTAVYYCYAYRWTARDTYWGQGTLVTVSS

SEQ ID NO: 718 - protein, 117 aa, Artificial Sequence
  Description of Artificial Sequence: Synthetic polypeptide
EVQLVESGGGLVQPGGSLTLSCAASMSDVSFLSMAWYRQAPGKKRELVAGISAEGSTLYMESVKGRFTISRDNAKNSVYLQMNSLRAEDTAVYYCYAYRWTSRLSYWGQGTLVTVSS

SEQ ID NO: 719 - protein, 117 aa, Artificial Sequence
  Description of Artificial Sequence: Synthetic polypeptide
EVQLVESGGGLVQPGGSLTLSCAASESSVSFLSSAWYRQAPGKKRELVAGISTDGSTVYIDSVKGRFTISRDNAKNSVYLQMNSLRAEDTAVYYCYAYSWTTRSRYWGQGTLVTVSS

SEQ ID NO: 720 - protein, 117 aa, Artificial Sequence
  Description of Artificial Sequence: Synthetic polypeptide
EVQLVESGGGLVQPGGSLTLSCAASGDSVSLLSMAWYRQAPGKKRELVAGISANGSTSYIDSVKGRFTISRDNAKNSVYLQMNSLRAEDTAVYYCYAYNWTSRYRYWGQGTLVTVSS

SEQ ID NO: 721 - protein, 117 aa, Artificial Sequence
  Description of Artificial Sequence: Synthetic polypeptide
EVQLVESGGGLVQPGGSLTLSCAASGSDVWYLSLAWYRQAPGKKRELVAGISDDGSRHYIESVKGRFTISRDNAKNSVYLQMNSLRAEDTAVYYCYAYSWKTRFPYWGQGTLVTVSS

SEQ ID NO: 722 - protein, 117 aa, Artificial Sequence
  Description of Artificial Sequence: Synthetic polypeptide
EVQLVESGGGLVQPGGSLTLSCAASKSAVAFLSIAWYRQAPGKKRELVAGISPDGSTVYIESVKGRFTISRDNAKNSVYLQMNSLRAEDTAVYYCYAYSWTTRYPYWGQGTLVTVSS

SEQ ID NO: 723 - protein, 117 aa, Artificial Sequence
  Description of Artificial Sequence: Synthetic polypeptide
EVQLVESGGGLVQPGGSLTLSCAASFSAVAYLSMAWYRQAPGKKRELVAGISDDGSTVYVDSVKGRFTISRDNAKNSVYLQMNSLRAEDTAVYYCYAYEWTNALPYWGQGTLVTVSS

SEQ ID NO: 724 - protein, 117 aa, Artificial Sequence
  Description of Artificial Sequence: Synthetic polypeptide
EVQLVESGGGLVQPGGSLTLSCAASVYSVYDLSTAWYRQAPGKKRELVAGISDDGSTVYFDSVKGRFTISRDNAKNSVYLQMNSLRAEDTAVYYCYAYSWITRSPYWGQGTLVTVSS

SEQ ID NO: 725 - protein, 117 aa, Artificial Sequence
  Description of Artificial Sequence: Synthetic polypeptide
EVQLVESGGGLVQPGGSLTLSCAASGDSVSFLSMAWYRQAPGKKRELVAGISDEGSTVYIGSVKGRFTISRDNAKNSVYLQMNSLRAEDTAVYYCYAYSWTTRRQYWGQGTLVTVSS

SEQ ID NO: 726 - protein, 117 aa, Artificial Sequence
  Description of Artificial Sequence: Synthetic polypeptide
EVQLVESGGGLVQPGGSLTLSCAASSSSVSLLSLAWYRQAPGKKRELVAGISDDGSIVYMDSVKGRFTISRDNAKNSVYLQMNSLRAEDTAVYYCYAYSWITRSPYWGQGTLVTVSS

SEQ ID NO: 727 - protein, 117 aa, Artificial Sequence
  Description of Artificial Sequence: Synthetic polypeptide
EVQLVESGGGLVQPGGSLTLSCAASADSVSFLSIAWYRQAPGKKRELVAGISDDGSKHYFDSVKGRFTISRDNAKNSVYLQMNSLRAEDTAVYYCYAYRWEESRQYWGQGTLVTVSS

SEQ ID NO: 728 - protein, 117 aa, Artificial Sequence
  Description of Artificial Sequence: Synthetic polypeptide
EVQLVESGGGLVQPGGSLTLSCAASASSVTLLSIAWYRQAPGKKRELVAGISTDGSTDYLHSVKGRFTISRDNAKNSVYLQMNSLRAEDTAVYYCYAYTWTTRLPYWGQGTLVTVTS

SEQ ID NO: 729 - protein, 117 aa, Artificial Sequence; identical to SEQ ID NO: 727
  Description of Artificial Sequence: Synthetic polypeptide

SEQ ID NO: 730 - protein, 117 aa, Artificial Sequence
  Description of Artificial Sequence: Synthetic polypeptide
EVQLVESGGGLVQPGGSLTLSCAASGTSVWLLSMAWYRQAPGKKRELVAGISYDGSTVYVESVKGRFTISRDNAKNSVYLQMNSLRAEDTAVYYCYAYSWTTRQPYWGQGTLVTVSS

SEQ ID NO: 731 - protein, 117 aa, Artificial Sequence
  Description of Artificial Sequence: Synthetic polypeptide
EVQLVESGGGLVQPGGSLTLSCAASGSSVSILSIAWYRQAPGKKRELVAGISDDGSTVYIDSVKGRFTISRDNAKNSVYLQMNSLRAEDTAVYYCYAYVWGTRLPYWGQGTLVTVSS

SEQ ID NO: 732 - protein, 117 aa, Artificial Sequence
  Description of Artificial Sequence: Synthetic polypeptide
EVQLVESGGGLVQPGGSLTLSCAASGTAVSNLSIAWYRQAPGKKRELVAGISDDGSTVYVDSVKGRFTISRDNAKNSVYLQMNSLRAEDTAVYYCYAYEWTNALPYWGQGTLVTVSS

SEQ ID NO: 733 - protein, 117 aa, Artificial Sequence
  Description of Artificial Sequence: Synthetic polypeptide
EVQLVESGGGLVQPGGSLTLSCAASGSAVSMLSLAWYRQAPGKKRELVAGISDDGSQVYIDSVKGRFTISRDNAKNSVYLQMNSLRAEDTAVYYCYAYRWEDALTYWGQGTLVTVSS

SEQ ID NO: 734 - protein, 117 aa, Artificial Sequence
  Description of Artificial Sequence: Synthetic polypeptide
EVQLVESGGGLVQPGGSLTLSCAASGMTVFFLSMAWYRQAPGKKRELVAGISVDGSTVYSDSVKGRFTISRDNAKNSVYLQMNSLRAEDTAVYYCYAYSWTTRYPYWGQGTLVTVSS

SEQ ID NO: 735 - protein, 117 aa, Artificial Sequence
  Description of Artificial Sequence: Synthetic polypeptide
EVQLVESGGGLVQPGGSLTLSCAASQYSVTFLSVAWYRQAPGKKRELVAGISDDGSNVYIDSVKGRFTISRDNAKNSVYLQMNSLRAEDTAVYYCYAYSWIDSLRYWGQGTLVTVSS

SEQ ID NO: 736 - protein, 117 aa, Artificial Sequence
  Description of Artificial Sequence: Synthetic polypeptide
EVQLVESGGGLVQPGGSLTLSCAASGETVSFLSLAWYRQAPGKKRELVAGISTDGSTVYFVSVKGRFTISRDNAKNSVYLQMNSLRAEDTAVYYCYAYSWTTPRAYWGQGTLVTVSS

SEQ ID NO: 737 - protein, 121 aa, Artificial Sequence
  Description of Artificial Sequence: Synthetic polypeptide
QVQLQESGGGLVQAGGSLRLSCAASGSIAYIYTMDWYRQAPGKQRELVATSTRDGNVDYAESVKGRFTISRDNAKNTVYLQMNSLKPEDTAVYYCNADLRTAVDLIRANYWGQGTQVTVSS

SEQ ID NO: 738 - protein, 125 aa, Artificial Sequence
  Description of Artificial Sequence: Synthetic polypeptide
QVQLQESGGGLVQAGDSLRLSCVVSGRTDSWYVMGWFRQAPGKDREFVAGVSWSYGNTYYADSVKGRFTASRDNAKNTAYLQMNSLNAEDTAVYYCAARVSREVIPTRWDLYNYWGQGTQVTVSS

SEQ ID NO: 739 - protein, 114 aa, Artificial Sequence
  Description of Artificial Sequence: Synthetic polypeptide
QVQLQESGGGSVQPGGSLRVSCVVSRTIISINAMTWYHQAPGKRRELVAIITSGGETNYADSVKGRFTISRDNAKNTAYLQMNNLKPEDTGVYYCNVVPPLGSWGQGTQVTVSS

SEQ ID NO: 740 - protein, 127 aa, Artificial Sequence
  Description of Artificial Sequence: Synthetic polypeptide
QVQLQESGGGRVQAGGSLRLSCSASARTLRLYAVGWFRQAPGKEREFVAGIGRSERTYYTDSVKGRFTLSRDNAKNTVFLEMNDLEPEDTAVYFCALTFQTTDMVDVPTTQHEYDYWGRGTQVTVSS

SEQ ID NO: 741 - protein, 121 aa, Artificial Sequence
  Description of Artificial Sequence: Synthetic polypeptide
QVQLQESGGGLVQAGGSLRLSCAASGSIAYIYTMDWYRQAPGKQRELVATSTHDGNTDYADSVKGRFTISRDNVKNTVYLQMNSLKPEDTAVYYCNADLRTAVDLIRANYWGQGTQVTVSS

SEQ ID NO: 742 - protein, 121 aa, Artificial Sequence
  Description of Artificial Sequence: Synthetic polypeptide
QVQLQESGGGLVQPGGSLRLSCAASGSIAYIYTMDWYRQAPGKQRELVATSTRDGNTDYADSVKGRFTISRDNAKDTVYLQMNSLKPEDTAVYYCNADLRTAVDLIRANYWGQGTQVTVSS

SEQ ID NO: 743 - protein, 119 aa, Artificial Sequence
  Description of Artificial Sequence: Synthetic polypeptide
QVQLQESGGGLVQAGGSLTLSCAASGRYQMAWFRQAPEKEREFVGTISSGDSTWYTNSVKGRFAISRDSARNTVYLQMNDLKPEDTAIYYCAAALYYRDSRRAADYPYWGQGTQVTVSS

SEQ ID NO: 744 - protein, 127 aa, Artificial Sequence
  Description of Artificial Sequence: Synthetic polypeptide
QVQLQESGGGRVQAGESLRLSCSTSTRTLKLYAVGWFRQAPGKERDFVAGIGRSERIYYIDSVKGRFTLSRDNAKNTVFLEMNDLEPEDTAVYFCAATFQTSDNVGVPTVQHEYDYWGQGTQVTVSS

SEQ ID NO: 745 - protein, 121 aa, Artificial Sequence
  Description of Artificial Sequence: Synthetic polypeptide
QVQLQESGGGLVQAGGSLRLSCAASGSIAYIYTMDWYRQAPGKQRELVATSTHDGNTDYADSVKGRFTISRDNAKNTVTLQMNSLKPEDTAVYYCNADLRTAVDLIRANYWGQGTQVTVSS

SEQ ID NO: 746 - protein, 121 aa, Artificial Sequence
  Description of Artificial Sequence: Synthetic polypeptide
QVQLQESGGGLVQAGGSLRLSCAASGSIAYIYTMDWYRQAPGKQRELVATFTRDGNTDYADSVKGRFTISRDNAKNTVYLQMNSLKPEDTAVYYCNTDLRTAVDLIRANYWGQGTQVTVSS

SEQ ID NO: 747 - protein, 121 aa, Artificial Sequence
  Description of Artificial Sequence: Synthetic polypeptide
QVQLQESGGGLVQAGGSLRLSCAASGSIAYIYTMDWYRQAPGKQRELVATSTHDGNTDYADSLKGRFTISRDNAKNTVYLQMNSLKPEDTAVYYCNADLRTAVDLIRANYWGQGTQVTVSS

SEQ ID NO: 748 - protein, 119 aa, Artificial Sequence
  Description of Artificial Sequence: Synthetic polypeptide
QVQLQESGGGSVQAGGSLRLSCAASGRYQMAWFRQAPEKEREFVGTISSGDSTWYTNSLKGRFAISRDSARDTVYLQMNDLKPEDTAVYYCAAALYYRDSRRAADYPYWGQGTQVTVSS

SEQ ID NO: 749 - protein, 114 aa, Artificial Sequence
  Description of Artificial Sequence: Synthetic polypeptide
QVQLQESGGGLVQTGGSLRLSCAVSGSIVTINAMTWYRQAPGKRRELVAIITSGGETNYADSVKGRFTISRDNAKNTAHLQMNSLNPEDTGVYYCNVVPPLGSWGQGTQVTVSS

SEQ ID NO: 750 - protein, 114 aa, Artificial Sequence
  Description of Artificial Sequence: Synthetic polypeptide
QVQLQESGGGLVQTGGSLRLSCAVSRSIVSIKSMTWYRQAPGKRRELVALITSGGETNYSDSVKGRFTISRDNAKNTVYLQMNSLKPEDTGVYYCNVVPPLGSWGQGTQVTVSS

SEQ ID NO: 751 - protein, 125 aa, Artificial Sequence
  Description of Artificial Sequence: Synthetic polypeptide
QVQLQESGGGLVETGGSLRLSCAGSGSTFRHHAMAWFRQTPGKEREFVSAINDHGDRTKYLDSVRGRFTISRDNTDNMVYLQMTDLRPEDTANYSCAAGPLVDYLETTPLVYTYWGHGTQVTVSS

SEQ ID NO: 752 - protein, 121 aa, Artificial Sequence
  Description of Artificial Sequence: Synthetic polypeptide
QVQLQESGGGLVQAGGSLRLSCAASGSIAYIYTMDWYRQAPGKQRELVATSTHDGNTDYADSVKGRFTISRDNAKNTVYLQMNSLKPEDTAVYYCNADLRTAVDLIRANYWGQGTQVTVSS

SEQ ID NO: 753 - protein, 121 aa, Artificial Sequence
  Description of Artificial Sequence: Synthetic polypeptide
QVQLQESGGGSVQAGGSLTLSCAASGSIAYIYTMDWYRQAPGKQRELVATSTHDGNTDYADSVKGRFTISRDNAKNTVYLQMNSLKPEDTAVYYCNADLRTAVDLIRANYWGQGTQVTVSS

SEQ ID NO: 754 - protein, 113 aa, Artificial Sequence
  Description of Artificial Sequence: Synthetic polypeptide
QVQLQESGGGLVQPGGSLRLSCTASVSIFSVNAVDWYRQSPGKERELVAIMTSDGSTNYGDSVKGRFTISRDNAKNTVYLQMNNLKPEDTAVYYCNTVPPRYWGQGTQVTVSS

SEQ ID NO: 755 - protein, 121 aa, Artificial Sequence
  Description of Artificial Sequence: Synthetic polypeptide
QVQLQESGGGLVQPGGSLRLSCAASGSIAYIYTMDWYRQAPGKQRELVATSTRDGNIDYADSVKGRFTISRDSAKNTVYLQMSSLKPEDTAVYYCNADLRTAVDLIRANYWGQGTQVTVSS

SEQ ID NO: 756 - protein, 119 aa, Artificial Sequence
  Description of Artificial Sequence: Synthetic polypeptide
QVQLQESGGGLVQAGGSLTLSCAASGRYQLAWFRQAPEKVREFVGTISSGDSTWYTNSVKGRFAISRDSARNTVYLQMNDLKPEDTAVYYCAAALYYRDSRRAADYPYWGQGTQVTVSS

SEQ ID NO: 757 - protein, 119 aa, Artificial Sequence
  Description of Artificial Sequence: Synthetic polypeptide
QVQLQESGGGSVQAGGSLRLSCAASGRYHMAWFRQAPEKEREFVGTISSGDSTWYTNSVKGRFAISRDSARNTAYLQMNDLKPEDTAVYYCAAALYYGDSRRAADYPYWGQGTQVTVSS

SEQ ID NO: 758 - protein, 121 aa, Artificial Sequence
  Description of Artificial Sequence: Synthetic polypeptide
QVQLQESGGGSVQAGGSLRLSCAASGSIAYIYTMDWYRQAPGKQRELVATSTHDGNTDYTDSVKGRFTISRDNAKNTVYLQMNSLKPEDTAVYYCNADLRTAVDLIRANYWGQGTQVTVSS

SEQ ID NO: 759 - protein, 121 aa, Artificial Sequence
  Description of Artificial Sequence: Synthetic polypeptide
QVQLQESGGGLVQAGGSLRLSCAASGSIAYIYTMDWYRQTPGKQRELVATSTRDANTDYAGSVKGRFTISRDNAKDTVYLQMNSLKPEDTAVYYCHADLRTAVDLIRANYWGQGTQVTVSS

SEQ ID NO: 760 - protein, 119 aa, Artificial Sequence
  Description of Artificial Sequence: Synthetic polypeptide
QVQLQESGGGLVQAGGSLRLSCAASGRYNMAWFRQAPEKEREFVGTITSADSTWYTNSVKGRFAITQDSARNTVYLQMNDLKPEDTAVYYCAAALYYGDSRRAADYPYWGQGTQVTVSS

SEQ ID NO: 761 - protein, 119 aa, Artificial Sequence
  Description of Artificial Sequence: Synthetic polypeptide
QVQLQESGGGLVQPGGSLRLSCAASGRYQMAWFRQAPEKEREFVGTISSGDSTWYTNSVKGRFAISRDSARTTVYLQMNDLKPEDTAVYYCAAALYYRDSWRAADYPYWGQGTQVTVSS

SEQ ID NO: 762 - protein, 119 aa, Artificial Sequence
  Description of Artificial Sequence: Synthetic polypeptide
QVQLQESGGGLVQPGESLRLSCAATGRYHLAWFRQAPEKEREFVGTITSADSTWYTNSVKGRFAITRDSARNTVYLQMNDLKPEDTAVYYCAAALYYGDSRRAADYPYWGQGTQVTVSS

SEQ ID NO: 763 - protein, 124 aa, Artificial Sequence
  Description of Artificial Sequence: Synthetic polypeptide
QVQLQESGGGLVQAGGSLKLSCADSGRSFSNYIMGWFRQAPGKEREFVAGLGWSPGNTYYADSVKGRFTISRDNAKNMVYLQMNSLNPEDTAVYYCAARRGDVIYTTPWNYVYWGQGTQVTVSS

SEQ ID NO: 764 - protein, 121 aa, Artificial Sequence
  Description of Artificial Sequence: Synthetic polypeptide
QVQLQESGGGLVQAGGSLRLSCAASGSIAYIYTMDWYRQAPGKQRELVATSTHDGNTDYADSVKGRFTISRDNAKNTVYLQMNSLKPEDTAVYYCNADLRTPVDLIRANYWGQGTQVTVSS

SEQ ID NO: 765 - protein, 119 aa, Artificial Sequence
  Description of Artificial Sequence: Synthetic polypeptide
QVQLQESGGGSVQAGGSLRLSCAAPGRYQMAWFRQAPEKEREFVGTISSGDSTWYTNSVKGRFAISRDSARNTVYLQMNDLKSEDTAVYYCAAALYYRDSRRAIDYPYWGQGTQVTVSS

SEQ ID NO: 766 - protein, 122 aa, Artificial Sequence
  Description of Artificial Sequence: Synthetic polypeptide
QVQLQESGGGSVQAGGSLRLSCAASGLTFSSYAMAWFRQAPGKQRELVARITSGGTTDYADSVKGRFTISRDNAKNTMYLQMNSLKPEDTAVYYCAADLTYRNLLLKLPHYWGQGTQVTVSS

SEQ ID NO: 767 - protein, 121 aa, Artificial Sequence
  Description of Artificial Sequence: Synthetic polypeptide
QVQLQESGGGLVQAGGSLRLSCAASGNIAYIYTMDWYRQAPGKQRELVATSTHDGSTDYADSVKGRFTISRDNAKNTVYLQMNSLKPEDTAVYYCNADLRTPVDLIRANYWGQGTQVTVSS

SEQ ID NO: 768 - protein, 121 aa, Artificial Sequence
  Description of Artificial Sequence: Synthetic polypeptide
QVQLQESGGGLVQPGGSLRLSCAASGSIAYIYTMDWYRQAPGKQRELVATSTWDGNTDYADSVKGRFTISRDNAKNTVYLQMNSLKPEDTAVYYCNADLRTAVDLIRANYWGQGTQVTVSS

SEQ ID NO: 769 - protein, 121 aa, Artificial Sequence
  Description of Artificial Sequence: Synthetic polypeptide
QVQLQESGGGLVQAGGSLRLSCAASGSIAYIYTMDWYRQAPGKQRELVATSTHDGNTDYADSVKGRFTISRDNAKNTVYLQMSSLKPDDTAVYYCNADLRTAVDLIRANYWGQGTQVTVSS

SEQ ID NO: 770 - protein, 123 aa, Artificial Sequence
  Description of Artificial Sequence: Synthetic polypeptide
QVQLQESGGGLVQAGESLSLSCAASGNDFVITDMHWYRQAPGKQREWVATITRFATTNYADSVKGRFTISRDNAKNTWYLQMNSLKPDDTAVYYCKAIGLRGVPDVNRQFEVWGQGTQVTVSS

SEQ ID NO: 771 - protein, 121 aa, Artificial Sequence
  Description of Artificial Sequence: Synthetic polypeptide
QVQLQESGGGLVQAGGSLRLSCAASGAIAYIYGMGWYRQAPGNQRELVAAISSGGSTDYADSVKGRFTISRDNAKNTVYLQMSSLKPEDTAVYYCNADVRTSRNLVRSDYWGQGTQVTVSS

SEQ ID NO: 772 - protein, 119 aa, Artificial Sequence
  Description of Artificial Sequence: Synthetic polypeptide
QVQLQESGGGLVQAGGSLRLSCAASGRYHTAWFRQAPEKEREFVGTISSGDSTWYTNSVKGRFAISRDSARNTVYLQMNDLKPEDTAVYYCAAALYYGDSRRAGDYPYWGQGTQVTVSS

SEQ ID NO: 773 - protein, 121 aa, Artificial Sequence
  Description of Artificial Sequence: Synthetic polypeptide
QVQLQESGGGLVQAGGSLRLSCAASGNIAYIYTMNWYRQAPGKQRELVATSTHAGNTDYADSVKGRFTISRDNAKNTVYLQMNSLKPEDTAVYYCNVDLRTAVDLIRANYWGQGTQVTVSS

SEQ ID NO: 774 - protein, 121 aa, Artificial Sequence
  Description of Artificial Sequence: Synthetic polypeptide
QVQLQESGGGLVQPGGSLRLSCAASGNIAYIYTMGWYRQAPGKQRELVATSTHDGNSDYADSVKGRFTISRDNAKNTVYLQMNTLKPDDTAVYYCNADLRTPVDRIRGNFWGQGTQVTVSS

SEQ ID NO: 775 - protein, 121 aa, Artificial Sequence
  Description of Artificial Sequence: Synthetic polypeptide
EVQLLESGGGLVQPGGSLTLSCAASGSIAYIYTMDWYRQAPGKQRELVATSTRDGNVDYADSVKGRFTISRDNSKNTLYLQMNSLRAEDTAVYYCNADLRTAVDLIRANYWGLGTQVTVSS

SEQ ID NO: 776 - protein, 125 aa, Artificial Sequence
  Description of Artificial Sequence: Synthetic polypeptide
EVQLLESGGGLVQPGGSLTLSCAASGRTDSWYVMGWFRQAPGKDREFVAGVSWSYGNTYYADSVKGRFTISRDNSKNTLYLQMNSLRAEDTAVYYCAARVSREVIPTRWDLYNYWGLGTQVTVSS

SEQ ID NO: 777 - protein, 127 aa, Artificial Sequence
  Description of Artificial Sequence: Synthetic polypeptide
EVQLLESGGGLVQPGGSLTLSCAASARTLRLYAVGWFRQAPGKEREFVAGIGRSERTYYTDSVKGRFTISRDNSKNTLYLQMNSLRAEDTAVYYCALTFQTTDMVDVPTTQHEYDYWGLGTQVTVSS

SEQ ID NO: 778 - protein, 114 aa, Artificial Sequence
  Description of Artificial Sequence: Synthetic polypeptide
EVQLLESGGGLVQPGGSLTLSCAASGSIVTINAMTWYRQAPGKRRELVAIITSGGETNYADSVKGRFTISRDNSKNTLYLQMNSLRAEDTAVYYCNVVPPLGSWGLGTQVTVSS

SEQ ID NO: 779 - protein, 119 aa, Artificial Sequence
  Description of Artificial Sequence: Synthetic polypeptide
EVQLLESGGGLVQPGGSLTLSCAASGRYHMAWFRQAPGKEREFVGTISSGDSTWYTNSVKGRFTISRDNSKNTLYLQMNSLRAEDTAVYYCAAALYYGDSRRAADYPYWGLGTQVTVSS

SEQ ID NO: 780 - protein, 125 aa, Artificial Sequence
  Description of Artificial Sequence: Synthetic polypeptide
EVQLLESGGGLVQPGGSLTLSCAASGSTFRHHAMAWFRQTPGKEREFVSAINDHGDRTKYLDSVKGRFTISRDNSKNTLYLQMNSLRAEDTAVYYCAAGPLVDYLETTPLVYTYWGLGTQVTVSS

SEQ ID NO: 781 - protein, 124 aa, Artificial Sequence
  Description of Artificial Sequence: Synthetic polypeptide
EVQLLESGGGLVQPGGSLTLSCAASGRSFSNYIMGWFRQAPGKEREFVAGLGWSPGNTYYADSVKGRFTISRDNSKNTLYLQMNSLRAEDTAVYYCAARRGDVIYTTPWNYVYWGLGTQVTVSS

SEQ ID NO: 782 - protein, 122 aa, Artificial Sequence
  Description of Artificial Sequence: Synthetic polypeptide
EVQLLESGGGLVQPGGSLTLSCAASGLTFSSYAMAWFRQAPGKQRELVARITSGGTTDYADSVKGRFTISRDNSKNTLYLQMNSLRAEDTAVYYCAADLTYRNLLLKLPHYWGLGTQVTVSS

SEQ ID NO: 783 - protein, 113 aa, Artificial Sequence
  Description of Artificial Sequence: Synthetic polypeptide
EVQLLESGGGLVQPGGSLTLSCAASVSIFSVNAVDWYRQSPGKERELVAIMTSDGSTNYDDSVKGRFTISRDNSKNTLYLQMNSLRAEDTAVYYCNTVPPRYWGLGTQVTVSS

SEQ ID NO: 784 - protein, 123 aa, Artificial Sequence
  Description of Artificial Sequence: Synthetic polypeptide
EVQLLESGGGLVQPGGSLTLSCAASGNDFVITDMHWYRQAPGKQREWVATITRFATTNYADSVKGRFTISRDNSKNTLYLQMNSLRAEDTAVYYCKAIGLRGVPDVNRQFEVWGLGTQVTVSS

SEQ ID NO: 785 - protein, 121 aa, Artificial Sequence
  Description of Artificial Sequence: Synthetic polypeptide
EVQLLESGGGLVQPGGSLTLSCAASGAIAYIYGMGWYRQAPGKQRELVAAISSGGSTDYADSVKGRFTISRDNSKNTLYLQMNSLRAEDTAVYYCNADVRTSRNLVRSDYWGLGTQVTVSS

SEQ ID NO: 786 - protein, 532 aa, Artificial Sequence
  Description of Artificial Sequence: Synthetic polypeptide
EVQLVESGGGLVQPGNSLRLSCAASGFTFSKFGMSWVRQGGGGGLDGNEEPGGLEWVSSISGSGRDTLYADSVKGRFTISRDNAKTTLYLQMNSLRPEDTAVYYCTIGGSLSVSSQGTLVTVSSGGGGKPLGLQARVVGGGGTQTVVTQEPSLTVSPGGTVTLTCASSTGAVTSGNYPNWVQQKPGQAPRGLIGGTKFLVPGTPARFSGSLLGGKAALTLSGVQPEDEAEYYCTLWYSNRWVFGGGTKLTVLGGGGSGGGGSGGGGSEVQLVESGGGLVQPGGSLKLSCAASGFTFNKYAINWVRQAPGKGLEWVARIRSKYNNYATYYADQVKDRFTISRDDSKNTAYLQMNNLKTEDTAVYYCVRHANFGNSYISYWAYWGQGTLVTVSSGGGGSGGGSEVQLLESGGGLVQPGGSLTLSCAASGRTDSWYVMGWFRQAPGKDREFVAGVSWSYGNTYYADSVKGRFTISRDNSKNTLYLQMNSLRAEDTAVYYCAARVSREVIPTRWDLYNYWGLGTQVTVSSHHHHHH

SEQ ID NO: 787 - protein, 532 aa, Artificial Sequence
  Description of Artificial Sequence: Synthetic polypeptide
EVQLVESGGGLVQPGNSLRLSCAASGFTFSKFGMSWVRQGGGGGLDGNEEPGGLEWVSSISGSGRDTLYADSVKGRFTISRDNAKTTLYLQMNSLRPEDTAVYYCTIGGSLSVSSQGTLVTVSSGGGGPQASTGRSGGGGGGTQTVVTQEPSLTVSPGGTVTLTCASSTGAVTSGNYPNWVQQKPGQAPRGLIGGTKFLVPGTPARFSGSLLGGKAALTLSGVQPEDEAEYYCTLWYSNRWVFGGGTKLTVLGGGGSGGGGSGGGGSEVQLVESGGGLVQPGGSLKLSCAASGFTFNKYAINWVRQAPGKGLEWVARIRSKYNNYATYYADQVKDRFTISRDDSKNTAYLQMNNLKTEDTAVYYCVRHANFGNSYISYWAYWGQGTLVTVSSGGGGSGGGSEVQLLESGGGLVQPGGSLTLSCAASGRTDSWYVMGWFRQAPGKDREFVAGVSWSYGNTYYADSVKGRFTISRDNSKNTLYLQMNSLRAEDTAVYYCAARVSREVIPTRWDLYNYWGLGTQVTVSSHHHHHH

SEQ ID NO: 788 - protein, 532 aa, Artificial Sequence
  Description of Artificial Sequence: Synthetic polypeptide
EVQLVESGGGLVQPGNSLRLSCAASGFTFSKFGMSWVRQGGGGGLDGNEEPGGLEWVSSISGSGRDTLYADSVKGRFTISRDNAKTTLYLQMNSLRPEDTAVYYCTIGGSLSVSSQGTLVTVSSGGGGPQGSTGRAAGGGGGTQTVVTQEPSLTVSPGGTVTLTCASSTGAVTSGNYPNWVQQKPGQAPRGLIGGTKFLVPGTPARFSGSLLGGKAALTLSGVQPEDEAEYYCTLWYSNRWVFGGGTKLTVLGGGGSGGGGSGGGGSEVQLVESGGGLVQPGGSLKLSCAASGFTFNKYAINWVRQAPGKGLEWVARIRSKYNNYATYYADQVKDRFTISRDDSKNTAYLQMNNLKTEDTAVYYCVRHANFGNSYISYWAYWGQGTLVTVSSGGGGSGGGSEVQLLESGGGLVQPGGSLTLSCAASGRTDSWYVMGWFRQAPGKDREFVAGVSWSYGNTYYADSVKGRFTISRDNSKNTLYLQMNSLRAEDTAVYYCAARVSREVIPTRWDLYNYWGLGTQVTVSSHHHHHH

SEQ ID NO: 789 - protein, 531 aa, Artificial Sequence
  Description of Artificial Sequence: Synthetic polypeptide
EVQLVESGGGLVQPGNSLRLSCAASGFTFSKFGMSWVRQGGGGGLDGNEEPGGLEWVSSISGSGRDTLYADSVKGRFTISRDNAKTTLYLQMNSLRPEDTAVYYCTIGGSLSVSSQGTLVTVSSGGGGPPASSGRAGGGGGTQTVVTQEPSLTVSPGGTVTLTCASSTGAVTSGNYPNWVQQKPGQAPRGLIGGTKFLVPGTPARFSGSLLGGKAALTLSGVQPEDEAEYYCTLWYSNRWVFGGGTKLTVLGGGGSGGGGSGGGGSEVQLVESGGGLVQPGGSLKLSCAASGFTFNKYAINWVRQAPGKGLEWVARIRSKYNNYATYYADQVKDRFTISRDDSKNTAYLQMNNLKTEDTAVYYCVRHANFGNSYISYWAYWGQGTLVTVSSGGGGSGGGSEVQLLESGGGLVQPGGSLTLSCAASGRTDSWYVMGWFRQAPGKDREFVAGVSWSYGNTYYADSVKGRFTISRDNSKNTLYLQMNSLRAEDTAVYYCAARVSREVIPTRWDLYNYWGLGTQVTVSSHHHHHH

SEQ ID NO: 790 - protein, 531 aa, Artificial Sequence
  Description of Artificial Sequence: Synthetic polypeptide
EVQLVESGGGLVQPGNSLRLSCAASGFTFSKFGMSWVRQGGGGGLDGNEEPGGLEWVSSISGSGRDTLYADSVKGRFTISRDNAKTTLYLQMNSLRPEDTAVYYCTIGGSLSVSSQGTLVTVSSGGGGPIPVQGRAHGGGGTQTVVTQEPSLTVSPGGTVTLTCASSTGAVTSGNYPNWVQQKPGQAPRGLIGGTKFLVPGTPARFSGSLLGGKAALTLSGVQPEDEAEYYCTLWYSNRWVFGGGTKLTVLGGGGSGGGGSGGGGSEVQLVESGGGLVQPGGSLKLSCAASGFTFNKYAINWVRQAPGKGLEWVARIRSKYNNYATYYADQVKDRFTISRDDSKNTAYLQMNNLKTEDTAVYYCVRHANFGNSYISYWAYWGQGTLVTVSSGGGGSGGGSEVQLLESGGGLVQPGGSLTLSCAASGRTDSWYVMGWFRQAPGKDREFVAGVSWSYGNTYYADSVKGRFTISRDNSKNTLYLQMNSLRAEDTAVYYCAARVSREVIPTRWDLYNYWGLGTQVTVSSHHHHHH

SEQ ID NO: 791 - protein, 532 aa, Artificial Sequence
  Description of Artificial Sequence: Synthetic polypeptide
EVQLVESGGGLVQPGNSLRLSCAASGFTFSKFGMSWVRQGGGGGLDGNEEPGGLEWVSSISGSGRDTLYADSVKGRFTISRDNAKTTLYLQMNSLRPEDTAVYYCTIGGSLSVSSQGTLVTVSSGGGGSGGGGSGGVVGGGGTQTVVTQEPSLTVSPGGTVTLTCASSTGAVTSGNYPNWVQQKPGQAPRGLIGGTKFLVPGTPARFSGSLLGGKAALTLSGVQPEDEAEYYCTLWYSNRWVFGGGTKLTVLGGGGSGGGGSGGGGSEVQLVESGGGLVQPGGSLKLSCAASGFTFNKYAINWVRQAPGKGLEWVARIRSKYNNYATYYADQVKDRFTISRDDSKNTAYLQMNNLKTEDTAVYYCVRHANFGNSYISYWAYWGQGTLVTVSSGGGGSGGGSEVQLLESGGGLVQPGGSLTLSCAASGRTDSWYVMGWFRQAPGKDREFVAGVSWSYGNTYYADSVKGRFTISRDNSKNTLYLQMNSLRAEDTAVYYCAARVSREVIPTRWDLYNYWGLGTQVTVSSHHHHHH

SEQ ID NO: 792 - protein, 503 aa, Artificial Sequence; identical to SEQ ID NO: 49
  Description of Artificial Sequence: Synthetic polypeptide

SEQ ID NO: 793 - protein, 513 aa, Artificial Sequence
  Description of Artificial Sequence: Synthetic polypeptide
EVQLLESGGGLVQPGGSLTLSCAASGRTDSWYVMGWFRQAPGKDREFVAGVSWSYGNTYYADSVKGRFTISRDNSKNTLYLQMNSLRAEDTAVYYCAARVSREVIPTRWDLYNYWGLGTQVTVSSGGGGSGGGSEVQLVESGGGLVQPGNSLRLSCAASGFTFSKFGMSWVRQAPGKGLEWVSSISGSGRDTLYADSVKGRFTISRDNAKTTLYLQMNSLRPEDTAVYYCTIGGSLSVSSQGTLVTVSSGGGGSGGGSEVQLVESGGGLVQPGGSLKLSCAASGFTFNKYAINWVRQAPGKGLEWVARIRSKYNNYATYYADQVKDRFTISRDDSKNTAYLQMNNLKTEDTAVYYCVRHANFGNSYISYWAYWGQGTLVTVSSGGGGSGGGGSGGGGSQTVVTQEPSLTVSPGGTVTLTCASSTGAVTSGNYPNWVQQKPGQAPRGLIGGTKFLVPGTPARFSGSLLGGKAALTLSGVQPEDEAEYYCTLWYSNRWVFGGGTKLTVLHHHHHH

SEQ ID NO: 794 - protein, 249 aa, Artificial Sequence; identical to SEQ ID NO: 56
  Description of Artificial Sequence: Synthetic polypeptide

SEQ ID NO: 795 - protein, 5 aa, Homo sapiens
APGKG

SEQ ID NO: 796 - protein, 143 aa, Artificial Sequence; identical to SEQ ID NO: 54
  Description of Artificial Sequence: Synthetic polypeptide

SEQ ID NO: 797 - protein, 143 aa, Artificial Sequence
  Description of Artificial Sequence: Synthetic polypeptide
EVQLVESGGGLVQPGNSLRLSCAASGFTFSKFGMSWVRQGGGGGLDGNEEPGGLEWVSSISGSGRDTLYADSVKGRFTISRDNAKTTLYLQMNSLRPEDTAVYYCTIGGSLSVSSQGTLVTVSSGGGGPQASTGRSGGGGGGT

SEQ ID NO: 798 - protein, 143 aa, Artificial Sequence
  Description of Artificial Sequence: Synthetic polypeptide
EVQLVESGGGLVQPGNSLRLSCAASGFTFSKFGMSWVRQGGGGGLDGNEEPGGLEWVSSISGSGRDTLYADSVKGRFTISRDNAKTTLYLQMNSLRPEDTAVYYCTIGGSLSVSSQGTLVTVSSGGGGPQGSTGRAAGGGGGT

SEQ ID NO: 799 - protein, 142 aa, Artificial Sequence
  Description of Artificial Sequence: Synthetic polypeptide
EVQLVESGGGLVQPGNSLRLSCAASGFTFSKFGMSWVRQGGGGGLDGNEEPGGLEWVSSISGSGRDTLYADSVKGRFTISRDNAKTTLYLQMNSLRPEDTAVYYCTIGGSLSVSSQGTLVTVSSGGGGPPASSGRAGGGGGT

SEQ ID NO: 800 - protein, 142 aa, Artificial Sequence
  Description of Artificial Sequence: Synthetic polypeptide
EVQLVESGGGLVQPGNSLRLSCAASGFTFSKFGMSWVRQGGGGGLDGNEEPGGLEWVSSISGSGRDTLYADSVKGRFTISRDNAKTTLYLQMNSLRPEDTAVYYCTIGGSLSVSSQGTLVTVSSGGGGPIPVQGRAHGGGGT

SEQ ID NO: 801 - protein, 6 aa, Homo sapiens
QDGNEE

SEQ ID NO: 802 - protein, 9 aa, Homo sapiens
QDGNEEMGG

SEQ ID NO: 803 - protein, 9 aa, Homo sapiens
QDGNEEMGG

SEQ ID NO: 804 - protein, 253 aa, Artificial Sequence
  Description of Artificial Sequence: Synthetic polypeptide
MALPVTALLLPLALLLHAARPTSDYKDDDDKTTTPAPRPPTPAPTIASQPLSLRPEACRPAAGGAVHTRGLDFACDIYIWAPLAGTCGVLLLSLVITLYKRGRKKLLYIFKQPFMRPVQTTQEEDGCSCRFPEEEEGGCELRVKFSRSADAPAYQQGQNQLYNELNLGRREEYDVLDKRRGRDPEMGGKPRRKNPQEGLYNELQKDKMAEAYSEIGMKGERRRGKGHDGLYQGLSTATKDTYDALHMQALPPR

SEQ ID NO: 805 - protein, 377 aa, Artificial Sequence
  Description of Artificial Sequence: Synthetic polypeptide
MALPVTALLLPLALLLHAARPEVQLLESGGGLVQPGGSLTLSCAASGRSFSNYIMGWFRQAPGKEREFVAGLGWSPGNTYYADSVKGRFTISRDNSKNTLYLQMNSLRAEDTAVYYCAARRGDVIYTTPWNYVYWGLGTQVTVSSTSDYKDDDDKTTTPAPRPPTPAPTIASQPLSLRPEACRPAAGGAVHTRGLDFACDIYIWAPLAGTCGVLLLSLVITLYKRGRKKLLYIFKQPFMRPVQTTQEEDGCSCRFPEEEEGGCELRVKFSRSADAPAYQQGQNQLYNELNLGRREEYDVLDKRRGRDPEMGGKPRRKNPQEGLYNELQKDKMAEAYSEIGMKGERRRGKGHDGLYQGLSTATKDTYDALHMQALPPR

SEQ ID NO: 806 - protein, 509 aa, Artificial Sequence
  Description of Artificial Sequence: Synthetic polypeptide
MALPVTALLLPLALLLHAARPEVQLVESGGGLVQPGNSLRLSCAASGFTFSKFGMSWVRQAPGKGLEWVSSISGSGRDTLYADSVKGRFTISRDNAKTTLYLQMNSLRPEDTAVYYCTIGGSLSVSSQGTLVTVSSGSGGSGGGGSGGGGGSGEVQLLESGGGLVQPGGSLTLSCAASGRSFSNYIMGWFRQAPGKEREFVAGLGWSPGNTYYADSVKGRFTISRDNSKNTLYLQMNSLRAEDTAVYYCAARRGDVIYTTPWNYVYWGLGTQVTVSSTSDYKDDDDKTTTPAPRPPTPAPTIASQPLSLRPEACRPAAGGAVHTRGLDFACDIYIWAPLAGTCGVLLLSLVITLYKRGRKKLLYIFKQPFMRPVQTTQEEDGCSCRFPEEEEGGCELRVKFSRSADAPAYQQGQNQLYNELNLGRREEYDVLDKRRGRDPEMGGKPRRKNPQEGLYNELQKDKMAEAYSEIGMKGERRRGKGHDGLYQGLSTATKDTYDALHMQALPPR

SEQ ID NO: 807 - protein, 514 aa, Artificial Sequence
  Description of Artificial Sequence: Synthetic polypeptide
MALPVTALLLPLALLLHAARPEVQLVESGGGLVQPGNSLRLSCAASGFTFSKFGMSWVRQANPWVPPREGLEWVSSISGSGRDTLYADSVKGRFTISRDNAKTTLYLQMNSLRPEDTAVYYCTIGGSLSVSSQGTLVTVSSGSGGSGGGGSGGGGGSGEVQLLESGGGLVQPGGSLTLSCAASGRSFSNYIMGWFRQAPGKEREFVAGLGWSPGNTYYADSVKGRFTISRDNSKNTLYLQMNSLRAEDTAVYYCAARRGDVIYTTPWNYVYWGLGTQVTVSSTSDYKDDDDKTTTPAPRPPTPAPTIASQPLSLRPEACRPAAGGAVHTRGLDFACDIYIWAPLAGTCGVLLLSLVITLYKRGRKKLLYIFKQPFMRPVQTTQEEDGCSCRFPEEEEGGCELRVKFSRSADAPAYQQGQNQLYNELNLGRREEYDVLDKRRGRDPEMGGKPRRKNPQEGLYNELQKDKMAEAYSEIGMKGERRRGKGHDGLYQGLSTATKDTYDALHMQALPPR

SEQ ID NO: 808 - protein, 514 aa, Artificial Sequence
  Description of Artificial Sequence: Synthetic polypeptide
MALPVTALLLPLALLLHAARPEVQLVESGGGLVQPGNSLRLSCAASGFTFSKFGMSWVRQANPWVPPREGLEWVSSISGSGRDTLYADSVKGRFTISRDNAKTTLYLQMNSLRPEDTAVYYCTIGGSLSVSSQGTLVTVSSGGGGLSGRSDNHGGGGTEVQLLESGGGLVQPGGSLTLSCAASGRSFSNYIMGWFRQAPGKEREFVAGLGWSPGNTYYADSVKGRFTISRDNSKNTLYLQMNSLRAEDTAVYYCAARRGDVIYTTPWNYVYWGLGTQVTVSSTSDYKDDDDKTTTPAPRPPTPAPTIASQPLSLRPEACRPAAGGAVHTRGLDFACDIYIWAPLAGTCGVLLLSLVITLYKRGRKKLLYIFKQPFMRPVQTTQEEDGCSCRFPEEEEGGCELRVKFSRSADAPAYQQGQNQLYNELNLGRREEYDVLDKRRGRDPEMGGKPRRKNPQEGLYNELQKDKMAEAYSEIGMKGERRRGKGHDGLYQGLSTATKDTYDALHMQALPPR

SEQ ID NO: 809 - protein, 378 aa, Artificial Sequence
  Description of Artificial Sequence: Synthetic polypeptide
MALPVTALLLPLALLLHAARPEVQLLESGGGLVQPGGSLTLSCAASGRTDSWYVMGWFRQAPGKDREFVAGVSWSYGNTYYADSVKGRFTISRDNSKNTLYLQMNSLRAEDTAVYYCAARVSREVIPTRWDLYNYWGLGTQVTVSSTSDYKDDDDKTTTPAPRPPTPAPTIASQPLSLRPEACRPAAGGAVHTRGLDFACDIYIWAPLAGTCGVLLLSLVITLYKRGRKKLLYIFKQPFMRPVQTTQEEDGCSCRFPEEEEGGCELRVKFSRSADAPAYQQGQNQLYNELNLGRREEYDVLDKRRGRDPEMGGKPRRKNPQEGLYNELQKDKMAEAYSEIGMKGERRRGKGHDGLYQGLSTATKDTYDALHMQALPPR

SEQ ID NO: 810 - protein, 510 aa, Artificial Sequence
  Description of Artificial Sequence: Synthetic polypeptide
MALPVTALLLPLALLLHAARPEVQLVESGGGLVQPGNSLRLSCAASGFTFSKFGMSWVRQAPGKGLEWVSSISGSGRDTLYADSVKGRFTISRDNAKTTLYLQMNSLRPEDTAVYYCTIGGSLSVSSQGTLVTVSSGSGGSGGGGSGGGGGSGEVQLLESGGGLVQPGGSLTLSCAASGRTDSWYVMGWFRQAPGKDREFVAGVSWSYGNTYYADSVKGRFTISRDNSKNTLYLQMNSLRAEDTAVYYCAARVSREVIPTRWDLYNYWGLGTQVTVSSTSDYKDDDDKTTTPAPRPPTPAPTIASQPLSLRPEACRPAAGGAVHTRGLDFACDIYIWAPLAGTCGVLLLSLVITLYKRGRKKLLYIFKQPFMRPVQTTQEEDGCSCRFPEEEEGGCELRVKFSRSADAPAYQQGQNQLYNELNLGRREEYDVLDKRRGRDPEMGGKPRRKNPQEGLYNELQKDKMAEAYSEIGMKGERRRGKGHDGLYQGLSTATKDTYDALHMQALPPR

SEQ ID NO: 811 - protein, 514 aa, Artificial Sequence
  Description of Artificial Sequence: Synthetic polypeptide
MALPVTALLLPLALLLHAARPEVQLVESGGGLVQPGNSLRLSCAASGFTFSKFGMSWVRQAHEPLTCRGLEWVSSISGSGRDTLYADSVKGRFTISRDNAKTTLYLQMNSLRPEDTAVYYCTIGGSLSVSSQGTLVTVSSGSGGSGGGGSGGGGGSGEVQLLESGGGLVQPGGSLTLSCAASGRTDSWYVMGWFRQAPGKDREFVAGVSWSYGNTYYADSVKGRFTISRDNSKNTLYLQMNSLRAEDTAVYYCAARVSREVIPTRWDLYNYWGLGTQVTVSSTSDYKDDDDKTTTPAPRPPTPAPTIASQPLSLRPEACRPAAGGAVHTRGLDFACDIYIWAPLAGTCGVLLLSLVITLYKRGRKKLLYIFKQPFMRPVQTTQEEDGCSCRFPEEEEGGCELRVKFSRSADAPAYQQGQNQLYNELNLGRREEYDVLDKRRGRDPEMGGKPRRKNPQEGLYNELQKDKMAEAYSEIGMKGERRRGKGHDGLYQGLSTATKDTYDALHMQALPPR

SEQ ID NO: 812 - protein, 514 aa, Artificial Sequence
  Description of Artificial Sequence: Synthetic polypeptide
MALPVTALLLPLALLLHAARPEVQLVESGGGLVQPGNSLRLSCAASGFTFSKFGMSWVRQASHPMSCRGLEWVSSISGSGRDTLYADSVKGRFTISRDNAKTTLYLQMNSLRPEDTAVYYCTIGGSLSVSSQGTLVTVSSGSGGSGGGGSGGGGGSGEVQLLESGGGLVQPGGSLTLSCAASGRTDSWYVMGWFRQAPGKDREFVAGVSWSYGNTYYADSVKGRFTISRDNSKNTLYLQMNSLRAEDTAVYYCAARVSREVIPTRWDLYNYWGLGTQVTVSSTSDYKDDDDKTTTPAPRPPTPAPTIASQPLSLRPEACRPAAGGAVHTRGLDFACDIYIWAPLAGTCGVLLLSLVITLYKRGRKKLLYIFKQPFMRPVQTTQEEDGCSCRFPEEEEGGCELRVKFSRSADAPAYQQGQNQLYNELNLGRREEYDVLDKRRGRDPEMGGKPRRKNPQEGLYNELQKDKMAEAYSEIGMKGERRRGKGHDGLYQGLSTATKDTYDALHMQALPPR

SEQ ID NO: 813 - protein, 514 aa, Artificial Sequence
  Description of Artificial Sequence: Synthetic polypeptide
MALPVTALLLPLALLLHAARPEVQLVESGGGLVQPGNSLRLSCAASGFTFSKFGMSWVRQAHEPLTCRGLEWVSSISGSGRDTLYADSVKGRFTISRDNAKTTLYLQMNSLRPEDTAVYYCTIGGSLSVSSQGTLVTVSSGGGGLSGRSDNHGGGGTEVQLLESGGGLVQPGGSLTLSCAASGRTDSWYVMGWFRQAPGKDREFVAGVSWSYGNTYYADSVKGRFTISRDNSKNTLYLQMNSLRAEDTAVYYCAARVSREVIPTRWDLYNYWGLGTQVTVSSTSDYKDDDDKTTTPAPRPPTPAPTIASQPLSLRPEACRPAAGGAVHTRGLDFACDIYIWAPLAGTCGVLLLSLVITLYKRGRKKLLYIFKQPFMRPVQTTQEEDGCSCRFPEEEEGGCELRVKFSRSADAPAYQQGQNQLYNELNLGRREEYDVLDKRRGRDPEMGGKPRRKNPQEGLYNELQKDKMAEAYSEIGMKGERRRGKGHDGLYQGLSTATKDTYDALHMQALPPR

SEQ ID NO: 814 - protein, 514 aa, Artificial Sequence
  Description of Artificial Sequence: Synthetic polypeptide
MALPVTALLLPLALLLHAARPEVQLVESGGGLVQPGNSLRLSCAASGFTFSKFGMSWVRQASHPMSCRGLEWVSSISGSGRDTLYADSVKGRFTISRDNAKTTLYLQMNSLRPEDTAVYYCTIGGSLSVSSQGTLVTVSSGSGGPLGLQARVVGGSGEVQLLESGGGLVQPGGSLTLSCAASGRTDSWYVMGWFRQAPGKDREFVAGVSWSYGNTYYADSVKGRFTISRDNSKNTLYLQMNSLRAEDTAVYYCAARVSREVIPTRWDLYNYWGLGTQVTVSSTSDYKDDDDKTTTPAPRPPTPAPTIASQPLSLRPEACRPAAGGAVHTRGLDFACDIYIWAPLAGTCGVLLLSLVITLYKRGRKKLLYIFKQPFMRPVQTTQEEDGCSCRFPEEEEGGCELRVKFSRSADAPAYQQGQNQLYNELNLGRREEYDVLDKRRGRDPEMGGKPRRKNPQEGLYNELQKDKMAEAYSEIGMKGERRRGKGHDGLYQGLSTATKDTYDALHMQALPPR

SEQ ID NO: 815 - protein, 514 aa, Artificial Sequence
  Description of Artificial Sequence: Synthetic polypeptide
MALPVTALLLPLALLLHAARPEVQLVESGGGLVQPGNSLRLSCAASGFTFSKFGMSWVRQASHPMSCRGLEWVSSISGSGRDTLYADSVKGRFTISRDNAKTTLYLQMNSLRPEDTAVYYCTIGGSLSVSSQGTLVTVSSGGGGLSGRSDNHGGGGTEVQLLESGGGLVQPGGSLTLSCAASGRTDSWYVMGWFRQAPGKDREFVAGVSWSYGNTYYADSVKGRFTISRDNSKNTLYLQMNSLRAEDTAVYYCAARVSREVIPTRWDLYNYWGLGTQVTVSSTSDYKDDDDKTTTPAPRPPTPAPTIASQPLSLRPEACRPAAGGAVHTRGLDFACDIYIWAPLAGTCGVLLLSLVITLYKRGRKKLLYIFKQPFMRPVQTTQEEDGCSCRFPEEEEGGCELRVKFSRSADAPAYQQGQNQLYNELNLGRREEYDVLDKRRGRDPEMGGKPRRKNPQEGLYNELQKDKMAEAYSEIGMKGERRRGKGHDGLYQGLSTATKDTYDALHMQALPPR

SEQ ID NO: 816 - protein, 21 aa, Unknown
  Description of Unknown: CD8a signal peptide
MALPVTALLLPLALLLHAARP

SEQ ID NO: 817 - protein, 115 aa, Artificial Sequence
  Description of Artificial Sequence: Synthetic polypeptide
EVQLVESGGGLVQPGNSLRLSCAASGFTFSKFGMSWVRQAPGKGLEWVSSISGSGRDTLYADSVKGRFTISRDNAKTTLYLQMNSLRPEDTAVYYCTIGGSLSVSSQGTLVTVSS

SEQ ID NO: 818 - protein, 120 aa, Artificial Sequence
  Description of Artificial Sequence: Synthetic polypeptide
EVQLVESGGGLVQPGNSLRLSCAASGFTFSKFGMSWVRQANPWVPPREGLEWVSSISGSGRDTLYADSVKGRFTISRDNAKTTLYLQMNSLRPEDTAVYYCTIGGSLSVSSQGTLVTVSS

SEQ ID NO: 819 - protein, 119 aa, Artificial Sequence
  Description of Artificial Sequence: Synthetic polypeptide
EVQLVESGGGLVQPGNSLRLSCAASGFTFSKFGMSWVRQAHEPLTCRGLEWVSSISGSGRDTLYADSVKGRFTISRDNAKTTLYLQMNSLRPEDTAVYYCTIGGSLSVSSQGTLVTVSS

SEQ ID NO: 820 - protein, 119 aa, Artificial Sequence
  Description of Artificial Sequence: Synthetic polypeptide
EVQLVESGGGLVQPGNSLRLSCAASGFTFSKFGMSWVRQASHPMSCRGLEWVSSISGSGRDTLYADSVKGRFTISRDNAKTTLYLQMNSLRPEDTAVYYCTIGGSLSVSSQGTLVTVSS

SEQ ID NO: 821 - protein, 124 aa, Artificial Sequence; identical to SEQ ID NO: 781
  Description of Artificial Sequence: Synthetic polypeptide

SEQ ID NO: 822 - protein, 125 aa, Artificial Sequence; identical to SEQ ID NO: 776
  Description of Artificial Sequence: Synthetic polypeptide

SEQ ID NO: 823 - protein, 68 aa, Unknown
  Description of Unknown: CD8a hinge/TM sequence
TTTPAPRPPTPAPTIASQPLSLRPEACRPAAGGAVHTRGLDFACDIYIWAPLAGTCGVLLLSLVITLY

SEQ ID NO: 824 - protein, 42 aa, Unknown
  Description of Unknown: 4-1BB intracellular domain sequence
KRGRKKLLYIFKQPFMRPVQTTQEEDGCSCRFPEEEEGGCEL

SEQ ID NO: 825 - protein, 112 aa, Unknown
  Description of Unknown: CD3z intracellular domain sequence
RVKFSRSADAPAYQQGQNQLYNELNLGRREEYDVLDKRRGRDPEMGGKPRRKNPQEGLYNELQKDKMAEAYSEIGMKGERRRGKGHDGLYQGLSTATKDTYDALHMQALPPR

SEQ ID NO: 826 - protein, 17 aa, Artificial Sequence
  Description of Artificial Sequence: Synthetic peptide
GSGGSGGGGSGGGGGSG

SEQ ID NO: 827 - protein, 17 aa, Artificial Sequence
  Description of Artificial Sequence: Synthetic peptide
GGGGLSGRSDNHGGGGT

SEQ ID NO: 828 - protein, 17 aa, Artificial Sequence
  Description of Artificial Sequence: Synthetic peptide
GSGGPLGLQARVVGGSG

SEQ ID NO: 829 - protein, 10 aa, Artificial Sequence
  Description of Artificial Sequence: Synthetic peptide
ANPWVPPREG

SEQ ID NO: 830 - protein, 9 aa, Artificial Sequence
  Description of Artificial Sequence: Synthetic peptide
AHEPLTCRG

SEQ ID NO: 831 - protein, 9 aa, Artificial Sequence
  Description of Artificial Sequence: Synthetic peptide
ASHPMSCRG

SEQ ID NO: 832 - protein, 516 aa, Artificial Sequence
  Description of Artificial Sequence: Synthetic polypeptide
MALPVTALLLPLALLLHAARPEVQLVESGGGLVQPGNSLRLSCAASGFTFSKFGMSWVRQANPWVPPREGLEWVSSISGSGRDTLYADSVKGRFTISRDNAKTTLYLQMNSLRPEDTAVYYCTIGGSLSVSSQGTLVTVSSGGGGPPASSGRAGGGGGGTEVQLLESGGGLVQPGGSLTLSCAASGRSFSNYIMGWFRQAPGKEREFVAGLGWSPGNTYYADSVKGRFTISRDNSKNTLYLQMNSLRAEDTAVYYCAARRGDVIYTTPWNYVYWGLGTQVTVSSTSDYKDDDDKTTTPAPRPPTPAPTIASQPLSLRPEACRPAAGGAVHTRGLDFACDIYIWAPLAGTCGVLLLSLVITLYKRGRKKLLYIFKQPFMRPVQTTQEEDGCSCRFPEEEEGGCELRVKFSRSADAPAYQQGQNQLYNELNLGRREEYDVLDKRRGRDPEMGGKPRRKNPQEGLYNELQKDKMAEAYSEIGMKGERRRGKGHDGLYQGLSTATKDTYDALHMQALPPR

SEQ ID NO: 833 - protein, 377 aa, Artificial Sequence
  Description of Artificial Sequence: Synthetic polypeptide
MALPVTALLLPLALLLHAARPEVQLLESGGGLVQPGGSLTLSCAASGRSFSNYIMGWFRQAPGKEREFVAGLGWSPGNTYYADSVKGRFTISRDNSKNTLYLQMNSLRAEDTAVYYCAARRGDVIYTTPWNYVYWGLGTQVTVSSTSDYKDDDDKTTTPAPRPPTPAPTIASQPLSLRPEACRPAAGGAVHTRGLDFASDIYIWAPLAGTCGVLLLSLVITLYKRGRKKLLYIFKQPFMRPVQTTQEEDGCSCRFPEEEEGGCELRVKFSRSADAPAYQQGQNQLYNELNLGRREEYDVLDKRRGRDPEMGGKPRRKNPQEGLYNELQKDKMAEAYSEIGMKGERRRGKGHDGLYQGLSTATKDTYDALHMQALPPR

SEQ ID NO: 834 - protein, 514 aa, Artificial Sequence
  Description of Artificial Sequence: Synthetic polypeptide
MALPVTALLLPLALLLHAARPEVQLVESGGGLVQPGNSLRLSCAASGFTFSKFGMSWVRQANPWVPPREGLEWVSSISGSGRDTLYADSVKGRFTISRDNAKTTLYLQMNSLRPEDTAVYYCTIGGSLSVSSQGTLVTVSSGGGGLSGRSDNHGGGGTEVQLLESGGGLVQPGGSLTLSCAASGRSFSNYIMGWFRQAPGKEREFVAGLGWSPGNTYYADSVKGRFTISRDNSKNTLYLQMNSLRAEDTAVYYCAARRGDVIYTTPWNYVYWGLGTQVTVSSTSDYKDDDDKTTTPAPRPPTPAPTIASQPLSLRPEACRPAAGGAVHTRGLDFASDIYIWAPLAGTCGVLLLSLVITLYKRGRKKLLYIFKQPFMRPVQTTQEEDGCSCRFPEEEEGGCELRVKFSRSADAPAYQQGQNQLYNELNLGRREEYDVLDKRRGRDPEMGGKPRRKNPQEGLYNELQKDKMAEAYSEIGMKGERRRGKGHDGLYQGLSTATKDTYDALHMQALPPR

SEQ ID NO: 835 - protein, 516 aa, Artificial Sequence
  Description of Artificial Sequence: Synthetic polypeptide
MALPVTALLLPLALLLHAARPEVQLVESGGGLVQPGNSLRLSCAASGFTFSKFGMSWVRQANPWVPPREGLEWVSSISGSGRDTLYADSVKGRFTISRDNAKTTLYLQMNSLRPEDTAVYYCTIGGSLSVSSQGTLVTVSSGGGGPPASSGRAGGGGGGTEVQLLESGGGLVQPGGSLTLSCAASGRSFSNYIMGWFRQAPGKEREFVAGLGWSPGNTYYADSVKGRFTISRDNSKNTLYLQMNSLRAEDTAVYYCAARRGDVIYTTPWNYVYWGLGTQVTVSSTSDYKDDDDKTTTPAPRPPTPAPTIASQPLSLRPEACRPAAGGAVHTRGLDFASDIYIWAPLAGTCGVLLLSLVITLYKRGRKKLLYIFKQPFMRPVQTTQEEDGCSCRFPEEEEGGCELRVKFSRSADAPAYQQGQNQLYNELNLGRREEYDVLDKRRGRDPEMGGKPRRKNPQEGLYNELQKDKMAEAYSEIGMKGERRRGKGHDGLYQGLSTATKDTYDALHMQALPPR

SEQ ID NO: 836 - protein, 514 aa, Artificial Sequence
  Description of Artificial Sequence: Synthetic polypeptide
MALPVTALLLPLALLLHAARPEVQLVESGGGLVQPGNSLRLSCAASGFTFSKFGMSWVRQANPWVPPREGLEWVSSISGSGRDTLYADSVKGRFTISRDNAKTTLYLQMNSLRPEDTAVYYCTIGGSLSVSSQGTLVTVSSGSGGSGGGGSGGGGGSGEVQLLESGGGLVQPGGSLTLSCAASGRSFSNYIMGWFRQAPGKEREFVAGLGWSPGNTYYADSVKGRFTISRDNSKNTLYLQMNSLRAEDTAVYYCAARRGDVIYTTPWNYVYWGLGTQVTVSSTSDYKDDDDKTTTPAPRPPTPAPTIASQPLSLRPEACRPAAGGAVHTRGLDFASDIYIWAPLAGTCGVLLLSLVITLYKRGRKKLLYIFKQPFMRPVQTTQEEDGCSCRFPEEEEGGCELRVKFSRSADAPAYQQGQNQLYNELNLGRREEYDVLDKRRGRDPEMGGKPRRKNPQEGLYNELQKDKMAEAYSEIGMKGERRRGKGHDGLYQGLSTATKDTYDALHMQALPPR

SEQ ID NO: 837 - protein, 368 aa, Artificial Sequence
  Description of Artificial Sequence: Synthetic polypeptide
MALPVTALLLPLALLLHAARPQVQLVESGGALVQPGGSLRLSCAASGFPVNRYSMRWYRQAPGKEREWVAGMSSAGDRSSYEDSVKGRFTISRDDARNTVYLQMNSLKPEDTAVYYCNVNVGFEYWGQGTQVTVSSTSDYKDDDDKTTTPAPRPPTPAPTIASQPLSLRPEACRPAAGGAVHTRGLDFACDIYIWAPLAGTCGVLLLSLVITLYKRGRKKLLYIFKQPFMRPVQTTQEEDGCSCRFPEEEEGGCELRVKFSRSADAPAYQQGQNQLYNELNLGRREEYDVLDKRRGRDPEMGGKPRRKNPQEGLYNELQKDKMAEAYSEIGMKGERRRGKGHDGLYQGLSTATKDTYDALHMQALPPR

SEQ ID NO: 838 - protein, 372 aa, Artificial Sequence
  Description of Artificial Sequence: Synthetic polypeptide
MALPVTALLLPLALLLHAARPEVQLLESGGGLVQPGGSLTLSCAASGFIFRAASMAWYRQSPGNERELVASISSGAFTNYADSVKARFTISRDNSKNTLYLQMNSLRAEDTAVYYCGATFLRSDGHHTINGQGTLVTVSSTSDYKDDDDKTTTPAPRPPTPAPTIASQPLSLRPEACRPAAGGAVHTRGLDFACDIYIWAPLAGTCGVLLLSLVITLYKRGRKKLLYIFKQPFMRPVQTTQEEDGCSCRFPEEEEGGCELRVKFSRSADAPAYQQGQNQLYNELNLGRREEYDVLDKRRGRDPEMGGKPRRKNPQEGLYNELQKDKMAEAYSEIGMKGERRRGKGHDGLYQGLSTATKDTYDALHMQALPPR

SEQ ID NO: 839 - protein, 504 aa, Artificial Sequence
  Description of Artificial Sequence: Synthetic polypeptide
MALPVTALLLPLALLLHAARPEVQLVESGGGLVQPGNSLRLSCAASGFTFSKFGMSWVRQAPGKGLEWVSSISGSGRDTLYADSVKGRFTISRDNAKTTLYLQMNSLRPEDTAVYYCTIGGSLSVSSQGTLVTVSSGSGGSGGGGSGGGGGSGEVQLLESGGGLVQPGGSLTLSCAASGFIFRAASMAWYRQSPGNERELVASISSGAFTNYADSVKARFTISRDNSKNTLYLQMNSLRAEDTAVYYCGATFLRSDGHHTINGQGTLVTVSSTSDYKDDDDKTTTPAPRPPTPAPTIASQPLSLRPEACRPAAGGAVHTRGLDFACDIYIWAPLAGTCGVLLLSLVITLYKRGRKKLLYIFKQPFMRPVQTTQEEDGCSCRFPEEEEGGCELRVKFSRSADAPAYQQGQNQLYNELNLGRREEYDVLDKRRGRDPEMGGKPRRKNPQEGLYNELQKDKMAEAYSEIGMKGERRRGKGHDGLYQGLSTATKDTYDALHMQALPPR

SEQ ID NO: 840 - protein, 511 aa, Artificial Sequence
  Description of Artificial Sequence: Synthetic polypeptide
MALPVTALLLPLALLLHAARPEVQLVESGGGLVQPGNSLRLSCAASGFTFSKFGMSWVRQRQSTFMAMDMPILEWVSSISGSGRDTLYADSVKGRFTISRDNAKTTLYLQMNSLRPEDTAVYYCTIGGSLSVSSQGTLVTVSSGSGGSGGGGSGGGGGSGEVQLLESGGGLVQPGGSLTLSCAASGFIFRAASMAWYRQSPGNERELVASISSGAFTNYADSVKARFTISRDNSKNTLYLQMNSLRAEDTAVYYCGATFLRSDGHHTINGQGTLVTVSSTSDYKDDDDKTTTPAPRPPTPAPTIASQPLSLRPEACRPAAGGAVHTRGLDFACDIYIWAPLAGTCGVLLLSLVITLYKRGRKKLLYIFKQPFMRPVQTTQEEDGCSCRFPEEEEGGCELRVKFSRSADAPAYQQGQNQLYNELNLGRREEYDVLDKRRGRDPEMGGKPRRKNPQEGLYNELQKDKMAEAYSEIGMKGERRRGKGHDGLYQGLSTATKDTYDALHMQALPPR

SEQ ID NO: 841 - protein, 509 aa, Artificial Sequence
  Description of Artificial Sequence: Synthetic polypeptide
MALPVTALLLPLALLLHAARPEVQLVESGGGLVQPGNSLRLSCAASGFTFSKFGMSWVRQQAYWWGNSRDLEWVSSISGSGRDTLYADSVKGRFTISRDNAKTTLYLQMNSLRPEDTAVYYCTIGGSLSVSSQGTLVTVSSGSGGSGGGGSGGGGGSGEVQLLESGGGLVQPGGSLTLSCAASGFIFRAASMAWYRQSPGNERELVASISSGAFTNYADSVKARFTISRDNSKNTLYLQMNSLRAEDTAVYYCGATFLRSDGHHTINGQGTLVTVSSTSDYKDDDDKTTTPAPRPPTPAPTIASQPLSLRPEACRPAAGGAVHTRGLDFACDIYIWAPLAGTCGVLLLSLVITLYKRGRKKLLYIFKQPFMRPVQTTQEEDGCSCRFPEEEEGGCELRVKFSRSADAPAYQQGQNQLYNELNLGRREEYDVLDKRRGRDPEMGGKPRRKNPQEGLYNELQKDKMAEAYSEIGMKGERRRGKGHDGLYQGLSTATKDTYDALHMQALPPR

SEQ ID NO: 842 - protein, 511 aa, Artificial Sequence
  Description of Artificial Sequence: Synthetic polypeptide
MALPVTALLLPLALLLHAARPEVQLVESGGGLVQPGNSLRLSCAASGFTFSKFGMSWVRQQAYWWGNSRDLEWVSSISGSGRDTLYADSVKGRFTISRDNAKTTLYLQMNSLRPEDTAVYYCTIGGSLSVSSQGTLVTVSSGGGGPQGSTGRAAGGGGGTEVQLLESGGGLVQPGGSLTLSCAASGFIFRAASMAWYRQSPGNERELVASISSGAFTNYADSVKARFTISRDNSKNTLYLQMNSLRAEDTAVYYCGATFLRSDGHHTINGQGTLVTVSSTSDYKDDDDKTTTPAPRPPTPAPTIASQPLSLRPEACRPAAGGAVHTRGLDFACDIYIWAPLAGTCGVLLLSLVITLYKRGRKKLLYIFKQPFMRPVQTTQEEDGCSCRFPEEEEGGCELRVKFSRSADAPAYQQGQNQLYNELNLGRREEYDVLDKRRGRDPEMGGKPRRKNPQEGLYNELQKDKMAEAYSEIGMKGERRRGKGHDGLYQGLSTATKDTYDALHMQALPPR

SEQ ID NO: 843 - protein, 513 aa, Artificial Sequence
  Description of Artificial Sequence: Synthetic polypeptide
MALPVTALLLPLALLLHAARPEVQLVESGGGLVQPGNSLRLSCAASGFTFSKFGMSWVRQRQSTFMAMDMPILEWVSSISGSGRDTLYADSVKGRFTISRDNAKTTLYLQMNSLRPEDTAVYYCTIGGSLSVSSQGTLVTVSSGGGGPQGSTGRAAGGGGGTEVQLLESGGGLVQPGGSLTLSCAASGFIFRAASMAWYRQSPGNERELVASISSGAFTNYADSVKARFTISRDNSKNTLYLQMNSLRAEDTAVYYCGATFLRSDGHHTINGQGTLVTVSSTSDYKDDDDKTTTPAPRPPTPAPTIASQPLSLRPEACRPAAGGAVHTRGLDFACDIYIWAPLAGTCGVLLLSLVITLYKRGRKKLLYIFKQPFMRPVQTTQEEDGCSCRFPEEEEGGCELRVKFSRSADAPAYQQGQNQLYNELNLGRREEYDVLDKRRGRDPEMGGKPRRKNPQEGLYNELQKDKMAEAYSEIGMKGERRRGKGHDGLYQGLSTATKDTYDALHMQALPPR

SEQ ID NO: 844 - protein, 68 aa, Artificial Sequence
  Description of Artificial Sequence: Synthetic polypeptide
TTTPAPRPPTPAPTIASQPLSLRPEACRPAAGGAVHTRGLDFASDIYIWAPLAGTCGVLLLSLVITLY

SEQ ID NO: 845 - protein, 19 aa, Artificial Sequence
  Description of Artificial Sequence: Synthetic peptide
GGGGPPASSGRAGGGGGGT

SEQ ID NO: 846 - protein, 122 aa, Artificial Sequence
  Description of Artificial Sequence: Synthetic polypeptide
EVQLVESGGGLVQPGNSLRLSCAASGFTFSKFGMSWVRQRQSTFMAMDMPILEWVSSISGSGRDTLYADSVKGRFTISRDNAKTTLYLQMNSLRPEDTAVYYCTIGGSLSVSSQGTLVTVSS

SEQ ID NO: 847 - protein, 120 aa, Artificial Sequence
  Description of Artificial Sequence: Synthetic polypeptide
EVQLVESGGGLVQPGNSLRLSCAASGFTFSKFGMSWVRQQAYWWGNSRDLEWVSSISGSGRDTLYADSVKGRFTISRDNAKTTLYLQMNSLRPEDTAVYYCTIGGSLSVSSQGTLVTVSS

SEQ ID NO: 848 - protein, 119 aa, Artificial Sequence
  Description of Artificial Sequence: Synthetic polypeptide
EVQLLESGGGLVQPGGSLTLSCAASGFIFRAASMAWYRQSPGNERELVASISSGAFTNYADSVKARFTISRDNSKNTLYLQMNSLRAEDTAVYYCGATFLRSDGHHTINGQGTLVTVSS

SEQ ID NO: 849 - protein, 115 aa, Artificial Sequence [sequence omitted]

SEQ ID NO: 850 - protein, 12 aa, Artificial Sequence
  Description of Artificial Sequence: Synthetic peptide
RQSTFMAMDMPI

SEQ ID NO: 851 - protein, 10 aa, Artificial Sequence
  Description of Artificial Sequence: Synthetic peptide
QAYWWGNSRD

SEQ ID NO: 852 - protein, 8 aa, Unknown
  Description of Unknown: metalloproteinase cleavage site
GPLGIAGQ

SEQ ID NO: 853 - protein, 8 aa, Unknown
  Description of Unknown: metalloproteinase cleavage site
AVRWLLTA

SEQ ID NO: 854 - protein, 6 aa, Unknown
  Description of Unknown: furin cleavage site
RRRRRR

SEQ ID NO: 855 - protein, 24 aa, Artificial Sequence
  Description of Artificial Sequence: Synthetic peptide
IYIWAPLAGTCGVLLLSLVITLYC

SEQ ID NO: 856 - protein, 22 aa, Artificial Sequence
  Description of Artificial Sequence: Synthetic peptide
GLLVAGVLVLLVSLGVAIHLCC

SEQ ID NO: 857 - protein, 25 aa, Artificial Sequence
  Description of Artificial Sequence: Synthetic peptide
ALIVLGGVAGLLLFIGLGIFFCVRC

SEQ ID NO: 858 - protein, 23 aa, Artificial Sequence
  Description of Artificial Sequence: Synthetic peptide
LCYLLDGILFIYGVILTALFLRV

SEQ ID NO: 859 - protein, 26 aa, Artificial Sequence
  Description of Artificial Sequence: Synthetic peptide
WVLVVVGGVLACYSLLVTVAFIIFWV

SEQ ID NO: 860 - protein, 25 aa, Artificial Sequence
  Description of Artificial Sequence: Synthetic peptide
AAILGLGLVLGLLGPLAILLALYLL

SEQ ID NO: 861 - protein, 24 aa, Artificial Sequence
  Description of Artificial Sequence: Synthetic peptide
ALPAALAVISFLLGLGLGVACVLA

SEQ ID NO: 862 - protein, 15 aa, Artificial Sequence
  Description of Artificial Sequence: Synthetic peptide
CPEPKSCDTPPPCPR

SEQ ID NO: 863 - protein, 12 aa, Artificial Sequence
  Description of Artificial Sequence: Synthetic peptide
ELKTPLGDTTHT

SEQ ID NO: 864 - protein, 7 aa, Artificial Sequence
  Description of Artificial Sequence: Synthetic peptide
KCCVDCP

SEQ ID NO: 865 - protein, 7 aa, Artificial Sequence
  Description of Artificial Sequence: Synthetic peptide
KYGPPCP

SEQ ID NO: 866 - protein, 15 aa, Homo sapiens
EPKSCDKTHTCPPCP

SEQ ID NO: 867 - protein, 12 aa, Homo sapiens
ERKCCVECPPCP

SEQ ID NO: 868 - protein, 17 aa, Homo sapiens
ELKTPLGDTTHTCPRCP

SEQ ID NO: 869 - protein, 12 aa, Homo sapiens
SPNMVPHAHHAQ

SEQ ID NO: 870 - protein, 15 aa, Artificial Sequence
  Description of Artificial Sequence: Synthetic peptide
EPKSCDKTYTCPPCP

SEQ ID NO: 871 - protein, 45 aa, Artificial Sequence
  Description of Artificial Sequence: Synthetic polypeptide
TTTPAPRPPTPAPTIASQPLSLRPEACRPAAGGAVHTRGLDFACD

SEQ ID NO: 872 - protein, 10 aa, Artificial Sequence
  Description of Artificial Sequence: Synthetic peptide
KSCDKTHTCP

SEQ ID NO: 873 - protein, 119 aa, Artificial Sequence
  Description of Artificial Sequence: Synthetic polypeptide
QVQLQESGGGLVQAGGSLRLSCAASGFIFRAASMAWYRQSPGNERELVASISSGAFTNYADSVKARFTISRDNAKNTVYLQMNSLKPEDTAVYFCGATFLRSDGHHTINGQGTQVTVSS

SEQ ID NO: 874 - protein, 119 aa, Artificial Sequence
  Description of Artificial Sequence: Synthetic polypeptide
QVQLQESGGGLVQAGGSLRLSCAASGFIFRAASMGWFRQSPGNERELVATVSSGDFTNYADSVKGRFTISRDNAKNTVYLQMNSLKPEDTAVYFCGATFVRSDGHHTIYGQGTQVTVSS

SEQ ID NO: 875 - protein, 119 aa, Artificial Sequence
  Description of Artificial Sequence: Synthetic polypeptide
QVQLQESGGGLVQAGGSLRLSCAASGFIFRAASMDWYRQFPGNERESIATISSGGFTNYADSVKGRFTISRDNAKNTVYLQMNSLKPEDTAVYFCGATFLRSDGHHTINGQGTQVTVSS

SEQ ID NO: 876 - protein, 119 aa, Artificial Sequence
  Description of Artificial Sequence: Synthetic polypeptide
QVQLQESGGGLVQAGGSLRLSCAASGFIFRAASMGWFRQSPGNERELVATVSSGGFTNYADSVKGRFTISRDNAKNTVYLQMNSLKPEDTAVYFCGATFVRSDGHHTIYGQGTQVTVSS

SEQ ID NO: 877 - protein, 119 aa, Artificial Sequence
  Description of Artificial Sequence: Synthetic polypeptide
QVQLQESGGGLVQAGGSLRLSCAASGFIFRAASMDWYRQSPGTQPELVATISSTGFTNYANSVKGRFTISRDNAKNTVYLQMNSLKPEDTAVYFCGATFLRSDGQHSIYGQGTQVTVSS

SEQ ID NO: 878 - protein, 124 aa, Artificial Sequence
  Description of Artificial Sequence: Synthetic polypeptide
QVQLQESGGGLVHTGGSLRLSCAASGDTFLRYAMGWFRQAPGKEREFVAAITWNGGNTDYAGSLKGRFTISRDNTKNTVYLQMNSLKPEDTAVYYCAADLTFGLASSHYQYDYWGQGTQVTVSS

SEQ ID NO: 879 - protein, 124 aa, Artificial Sequence
  Description of Artificial Sequence: Synthetic polypeptide
QVQLQESGGGLVQAGGSLRLSCAASGDTFLRYAMGWFRQAPGKEREFVAAITWNGGNTDYAGSLKGRFTISRDNTKNTVYLQMNSLKPEDTAVYYCAADLTFGLASSHYQYDYWGQGTQVTVSS

SEQ ID NO: 880 - protein, 124 aa, Artificial Sequence
  Description of Artificial Sequence: Synthetic polypeptide
QVQLQESGGGLVHTGGSLRLSCAFSGDTFLRYAMGWFRQAPGKEREFVAAITWNGGNTDYADSLKGRFTISRDNTKNTVYLQMNSLRPEDTAVYYCAADLTFGLASSHYQYDYWGQGTQVTVSS

SEQ ID NO: 881 - protein, 124 aa, Artificial Sequence
  Description of Artificial Sequence: Synthetic polypeptide
QVQLQESGGGLVQPGGSLRLSCAASGDTFLRYAMGWFRQAPGKEREFVAAITWNGGNTDYAGSLKGRFTISRDNTKNTVYLQMNSLKPEDTAVYYCAADLTFGLASSHYQYDYWGQGTQVTVSS

SEQ ID NO: 882 - protein, 112 aa, Artificial Sequence
  Description of Artificial Sequence: Synthetic polypeptide
QVQLQESGGGSVLAGGSLRLSCAASGFTFSSYYMSWVRQAPGKGLEWVSGIHYTGDWTNYADSVKGRFTISRDNAKNELYLEMNNLKPEDTAVYYCARGSDKGQGTQVTVSS

SEQ ID NO: 883 - protein, 112 aa, Artificial Sequence
  Description of Artificial Sequence: Synthetic polypeptide
QVQLQESGGGSVQAGGSLRLSCAASGFTFSSYYMSWVRQAPGKGLEWVSGIHYTGDWTNYADSVKGRFTISRDNAKNELYLEMNNLKPEDTAVYYCARGSDKGQGTQVTVSS

SEQ ID NO: 884 - protein, 112 aa, Artificial Sequence
  Description of Artificial Sequence: Synthetic polypeptide
QVQLQESGGGLVQPGGSLRLSCAASGFTFSDWAMSWVRQAPGKGLEWVSGIHYGDHTTHYADFVKGRFTISRDDAKNTLYLQMNSLKPEDTAVYYCARGSTKGQGTQVTVSS

SEQ ID NO: 885 - protein, 112 aa, Artificial Sequence
  Description of Artificial Sequence: Synthetic polypeptide
QVQLQESGGGLVQPGGSLRLSCAASGFTFSDWAMSWVRQAPGKGLEWVSSIHYGDHTTHYADFVKGRFTISRDDAKNTLYLQMNSLKPEDTAVYYCEKGTTRGQGTQVTVSS

SEQ ID NO: 886 - protein, 119 aa, Artificial Sequence
  Description of Artificial Sequence: Synthetic polypeptide
QVQLQESGGGLVQAGGSLKLSCAASGNVFRAATMAWYRQAPEKQREMVATIASGGTTNYADFVKGRFTISRDNAKNTVYLQMNTLKPEDTAVYYCNAGYLTSLGPKNYWGQGTQVTVSS

SEQ ID NO: 887 - protein, 119 aa, Artificial Sequence
  Description of Artificial Sequence: Synthetic polypeptide
  MOD_RES (44)..(44): Any amino acid
QVQLQESGGGLVQPGGSLRLSCAASGNVFRAATMAWYRQAPEKXREMVATIASGGTTNYADFVKGRFTISRDNAKNTVYLQMNTLKPEDTAVYYCNAGYLTSLGPKNYWGQGTQVTVSS

SEQ ID NO: 888 - protein, 119 aa, Artificial Sequence
  Description of Artificial Sequence: Synthetic polypeptide
QVQLQESGGGLVQAGGSLRLSCAASGNVFRAATMAWYRQVPEKQREMVATIASGGTTNYADFVKGRFTISRDNAKNTVYLQMNTLKPEDTAVYYCNALYLTSLGPKSYWGQGTQVTVSS

SEQ ID NO: 889 - protein, 111 aa, Artificial Sequence
  Description of Artificial Sequence: Synthetic polypeptide
QVQLQESGGGLVQPGGSLRLSCAASGFAFGNHWMYWYRQAPGRGRELVASISSGGSTNYVDSVKGRFTISRDNARNTVYLQMYSLKPEDTAVYYCGTSDNWGQGTQVTVSS

SEQ ID NO: 890 - protein, 111 aa, Artificial Sequence
  Description of Artificial Sequence: Synthetic polypeptide
QVQLQESGGGLVQAGGSLRLSCAASGFAFGNHWMYWYRQAPGRGRELVASISSGGSTNYVDSVKGRFTISRDNARNTVYLQMYSLRPEDTAVYYCGTSDNWGQGTQVTVSS

SEQ ID NO: 891 - protein, 111 aa, Artificial Sequence
  Description of Artificial Sequence: Synthetic polypeptide
QVQLQESGGGLVQAGGSLRLSCAASGFAFGNHWMYWYRQAPGRGRELVASISSGGSTNYVDSVKGRFTISRDNARNTVYLQMYSLKPEDTAVYYCGTSDNWGQGTQVTVSS

SEQ ID NO: 892 - protein, 119 aa, Artificial Sequence
  Description of Artificial Sequence: Synthetic polypeptide
QVQLQESGGGLVQAGGSLRLSCAASGFIFRAASISWYRQSPGNERELVATINSGGFTNYADSVLGRFTISRDNAKNTGYLQMNSLKPEDTAVYFCAATFLRSDGQPPIWGQGTQVTVSS

SEQ ID NO: 893 - protein, 119 aa, Artificial Sequence
  Description of Artificial Sequence: Synthetic polypeptide
QVQLQESGGGLVQAGGSLRLSCAASGFIFRAASMGWYRQSPGNERELVATINSGGFTNYADSVKGRFTISRDNAKNTGYLQMNSLKPEDTAVYFCAATFLRSDGQPPIWGQGTQVTVSS

SEQ ID NO: 894 - protein, 122 aa, Artificial Sequence
  Description of Artificial Sequence: Synthetic polypeptide
QVQLQESGGGLVQAGGSLRLSCAASEYILSMYRMAWYRQAPGKVRELVADMSSGGTTNYADFVKGRFTISRDNDRNTVYLQMNRLQPEDTAAYYCNVAGRTGPPSYDAFNNWGQGTQVTVSS

SEQ ID NO: 895 - protein, 122 aa, Artificial Sequence
  Description of Artificial Sequence: Synthetic polypeptide
QVQLQESGGGLVQPGASLRVSCAASEYILSMYRMAWYRQAPGKVRELVADMSSGGTTNYADFVKGRFTISRDNDRNTVYLQMNRLQPEDTAAYYCNVAGRTGPPSYDAFNNWGQGTQVTVSS

SEQ ID NO: 896 - protein, 122 aa, Artificial Sequence
  Description of Artificial Sequence: Synthetic polypeptide
QVQLQESGGGLVQPGGSLRLSCAASESISSFIAVGWYRQAPGKERELVAGINRSGFTYYTDSVKGRFSISRDNAKNTVLLQMTSLKPEDTAVYYCNAGGLYFSNAYTQGDYWGQGTQVTVSS

SEQ ID NO: 897 - protein, 122 aa, Artificial Sequence
  Description of Artificial Sequence: Synthetic polypeptide
QVQLQESGGGLVQTGGSLRLSCAASESISSFIAVGWYRQAPGKERELVAGINRSGFTYYTDSVKGRFSISRDNAKNTVLLQMTSLKPEDTAVYYCNAGGLYFSNAYTQGDYWGQGTQVTVSS

SEQ ID NO: 898 - protein, 119 aa, Artificial Sequence
  Description of Artificial Sequence: Synthetic polypeptide
QVQLQESGGGLVQAGGSLRLSCAASGSVFRANVMGWYRQAPGKQHELVARIDPGGTTTYADPVKGRFTISRDNAKKTVYLQMNSLKPDDTAVYYCNAIILLSGGPKDYWGQGTQVTVSS

SEQ ID NO: 899 - protein, 120 aa, Artificial Sequence
  Description of Artificial Sequence: Synthetic polypeptide
QVQLQESGGGLVQAGGSLRLSCAPSGRTSSIFGMGWFRQAPGKEREFVASINWSGGSTSYADSVKGRFTISRDNAKNEMYLQMNSLKFEDTAVYVCAAAVLTNKPSWNFWGQGTQVTVSS

SEQ ID NO: 900 - protein, 121 aa, Artificial Sequence
  Description of Artificial Sequence: Synthetic polypeptide
QVQLQESGGGLVQAGGSLRLSCAASGPIFSDTIRTMGWYRQAAGKQRELVATIASFPSRTNYVDSVKGRFTISRDIAKNTVYLQMDSLKPEDTAVYYCNVDLASIPTKTYWGQGTQVTVSS

SEQ ID NO: 901 - protein, 120 aa, Artificial Sequence
  Description of Artificial Sequence: Synthetic polypeptide
QVQLQESGGGLVQAGGSLRLSCAASGSIFGINAMGWYRQAPGKQRESVAFITIGGNTNYLDSVKGRFTISRDNAKNTVYLQMNGLKPEDTAVYYCNTNPPLILTAGGLYWGQGTQVTVSS

SEQ ID NO: 902 - protein, 121 aa, Artificial Sequence
  Description of Artificial Sequence: Synthetic polypeptide
QVQLQESGGGLVQPGGSLRLSCATSANRFNINVMGWYRQAPGQQRELVATINIGGSTDYADSVKGRFTISRDNAKNTVYLQLSDLKPEDTAVYYCNVKLRVSGPTGPNVYWGQGTQVTVSS

SEQ ID NO: 903 - protein, 116 aa, Artificial Sequence
  Description of Artificial Sequence: Synthetic polypeptide
QVQLQESGGGLVQAGGSLKLSCTASGTILSTMAWYRQAPGKQRELVATISRGGTTNYSDSVKGRFAISRDSTKNTVYLQMNSLKPEDTAVYYCNTPLTDYGMGYNWGQGTQVTVSS

SEQ ID NO: 904 - protein, 120 aa, Artificial Sequence
  Description of Artificial Sequence: Synthetic polypeptide
QVQLQESGGGLVQAGGSLRLSCAVSGSIFSLNTLAWYRQAPGRQRDLIARITGGGTTVYADSVKGRFTISRDNAKNTVYLQMNSLKPEDTAVYYCNLMVRHPSGSTYEYWGQGTQVTVSS

SEQ ID NO: 905 - protein, 119 aa, Artificial Sequence
  Description of Artificial Sequence: Synthetic polypeptide
QVQLQESGGGLVQAGGSLRLSCAASGIIFRGTTMGWFRQAPGKQRESVASISPLGTTSYSGSVEGRFTVSRDNAKNTLFLQMNSLKSEDTAVYYCNAIQVTNVGPRVYWGQGTQVTVSS

SEQ ID NO: 906 - protein, 124 aa, Artificial Sequence
  Description of Artificial Sequence: Synthetic polypeptide
QVQLQESGGGLVQPGGSLRLSCASSGFTLDDYTIGWFRQAPGKEREGVSCISRRDDSTYYADSVKGRFTISRDNAKNTVDLQMISLRPEDTAVYYCAATPRSYTLRCLGKFDFQGQGTQVTVSS

SEQ ID NO: 907 - protein, 121 aa, Artificial Sequence
  Description of Artificial Sequence: Synthetic polypeptide
QVQLQESGGGLVQAGGSLRLSCAASGNIVRMTNMAWYRQAPGKQREFVATISAGGSTTYVDSVKDRFTISRDNTKNTVYLQMNYLKPEDTAVYYCATGSILTNRGAIPGSWGHGTQVTVSS

SEQ ID NO: 908 - protein, 127 aa, Artificial Sequence
  Description of Artificial Sequence: Synthetic polypeptide
QVQLQESGGGLVQAGGSLRLSCAAPGFAFNDHAILWFRQAPGKEREGVSEICRDGTTYYTDSVKGRFTISSDNAKNTVYLQMNSVKTDDTAVYYCAVDRRRYYCSGNRAFSSDYYYWGQGTQVTVSS

SEQ ID NO: 909 - protein, 119 aa, Artificial Sequence
  Description of Artificial Sequence: Synthetic polypeptide
QVQLQESGGGLVQAGGSLRLSCVHSGSIFRASTMAWYRQAPGKQRELVAQIMSGGGTNYAGSVKGRFTISRDNANNTVYLQMNSLKPEDTAVYYCNAAQITSWGPKVYWGQGTQVTVSS

SEQ ID NO: 910 - protein, 122 aa, Artificial Sequence
  Description of Artificial Sequence: Synthetic polypeptide
QVQLQESGGGLVQPGGSLRLSCAASGRINSINTMGWYRQAPGNQRELVAEITRGGTTNYADSVQGRYAISRDNAKNLVYLQMNSLKPEDTDVYYCNAQTFPTFSRPTGLDYWGQGTQVTVSS

SEQ ID NO: 911 - protein, 390 aa, Artificial Sequence
  Description of Artificial Sequence: Synthetic polypeptide
VVGGGGTQTVVTQEPSLTVSPGGTVTLTCASSTGAVTSGNYPNWVQQKPGQAPRGLIGGTKFLVPGTPARFSGSLLGGKAALTLSGVQPEDEAEYYCTLWYSNRWVFGGGTKLTVLGGGGSGGGGSGGGGSEVQLVESGGGLVQPGGSLKLSCAASGFTFNKYAINWVRQAPGKGLEWVARIRSKYNNYATYYADQVKDRFTISRDDSKNTAYLQMNNLKTEDTAVYYCVRHANFGNSYISYWAYWGQGTLVTVSSGGGGSGGGSQVQLQESGGGLVQAGGSLRLSCAASGSVFRANVMGWYRQAPGKQHELVARIDPGGTTTYADPVKGRFTISRDNAKKTVYLQMNSLKPDDTAVYYCNAIILLSGGPKDYWGQGTQVTVSSHHHHHH

SEQ ID NO: 912 - protein, 395 aa, Artificial Sequence
  Description of Artificial Sequence: Synthetic polypeptide
VVGGGGTQTVVTQEPSLTVSPGGTVTLTCASSTGAVTSGNYPNWVQQKPGQAPRGLIGGTKFLVPGTPARFSGSLLGGKAALTLSGVQPEDEAEYYCTLWYSNRWVFGGGTKLTVLGGGGSGGGGSGGGGSEVQLVESGGGLVQPGGSLKLSCAASGFTFNKYAINWVRQAPGKGLEWVARIRSKYNNYATYYADQVKDRFTISRDDSKNTAYLQMNNLKTEDTAVYYCVRHANFGNSYISYWAYWGQGTLVTVSSGGGGSGGGSQVQLQESGGGLVQPGGSLRLSCASSGFTLDDYTIGWFRQAPGKEREGVSCISRRDDSTYYADSVKGRFTISRDNAKNTVDLQMISLRPEDTAVYYCAATPRSYTLRCLGKFDFQGQGTQVTVSSHHHHHH

SEQ ID NO: 913 - protein, 392 aa, Artificial Sequence
  Description of Artificial Sequence: Synthetic polypeptide
VVGGGGTQTVVTQEPSLTVSPGGTVTLTCASSTGAVTSGNYPNWVQQKPGQAPRGLIGGTKFLVPGTPARFSGSLLGGKAALTLSGVQPEDEAEYYCTLWYSNRWVFGGGTKLTVLGGGGSGGGGSGGGGSEVQLVESGGGLVQPGGSLKLSCAASGFTFNKYAINWVRQAPGKGLEWVARIRSKYNNYATYYADQVKDRFTISRDDSKNTAYLQMNNLKTEDTAVYYCVRHANFGNSYISYWAYWGQGTLVTVSSGGGGSGGGSQVQLQESGGGLVQAGGSLRLSCAASGNIVRMTNMAWYRQAPGKQREFVATISAGGSTTYVDSVKDRFTISRDNTKNTVYLQMNYLKPEDTAVYYCATGSILTNRGAIPGSWGHGTQVTVSSHHHHHH

SEQ ID NO: 914 - protein, 390 aa, Artificial Sequence
  Description of Artificial Sequence: Synthetic polypeptide
VVGGGGTQTVVTQEPSLTVSPGGTVTLTCASSTGAVTSGNYPNWVQQKPGQAPRGLIGGTKFLVPGTPARFSGSLLGGKAALTLSGVQPEDEAEYYCTLWYSNRWVFGGGTKLTVLGGGGSGGGGSGGGGSEVQLVESGGGLVQPGGSLKLSCAASGFTFNKYAINWVRQAPGKGLEWVARIRSKYNNYATYYADQVKDRFTISRDDSKNTAYLQMNNLKTEDTAVYYCVRHANFGNSYISYWAYWGQGTLVTVSSGGGGSGGGSQVQLQESGGGLVQAGGSLRLSCAASGFIFRAASISWYRQSPGNERELVATINSGGFTNYADSVLGRFTISRDNAKNTGYLQMNSLKPEDTAVYFCAATFLRSDGQPPIWGQGTQVTVSSHHHHHH

SEQ ID NO: 915 - protein, 390 aa, Artificial Sequence
  Description of Artificial Sequence: Synthetic polypeptide
VVGGGGTQTVVTQEPSLTVSPGGTVTLTCASSTGAVTSGNYPNWVQQKPGQAPRGLIGGTKFLVPGTPARFSGSLLGGKAALTLSGVQPEDEAEYYCTLWYSNRWVFGGGTKLTVLGGGGSGGGGSGGGGSEVQLVESGGGLVQPGGSLKLSCAASGFTFNKYAINWVRQAPGKGLEWVARIRSKYNNYATYYADQVKDRFTISRDDSKNTAYLQMNNLKTEDTAVYYCVRHANFGNSYISYWAYWGQGTLVTVSSGGGGSGGGSQVQLQESGGGLVQAGGSLRLSCAASGNVFRAATMAWYRQVPEKQREMVATIASGGTTNYADFVKGRFTISRDNAKNTVYLQMNTLKPEDTAVYYCNALYLTSLGPKSYWGQGTQVTVSSHHHHHH

SEQ ID NO: 916 - protein, 398 aa, Artificial Sequence
  Description of Artificial Sequence: Synthetic polypeptide
VVGGGGTQTVVTQEPSLTVSPGGTVTLTCASSTGAVTSGNYPNWVQQKPGQAPRGLIGGTKFLVPGTPARFSGSLLGGKAALTLSGVQPEDEAEYYCTLWYSNRWVFGGGTKLTVLGGGGSGGGGSGGGGSEVQLVESGGGLVQPGGSLKLSCAASGFTFNKYAINWVRQAPGKGLEWVARIRSKYNNYATYYADQVKDRFTISRDDSKNTAYLQMNNLKTEDTAVYYCVRHANFGNSYISYWAYWGQGTLVTVSSGGGGSGGGSQVQLQESGGGLVQAGGSLRLSCAAPGFAFNDHAILWFRQAPGKEREGVSEICRDGTTYYTDSVKGRFTISSDNAKNTVYLQMNSVKTDDTAVYYCAVDRRRYYCSGNRAFSSDYYYWGQGTQVTVSSHHHHHH

SEQ ID NO: 917 - protein, 382 aa, Artificial Sequence
  Description of Artificial Sequence: Synthetic polypeptide
VVGGGGTQTVVTQEPSLTVSPGGTVTLTCASSTGAVTSGNYPNWVQQKPGQAPRGLIGGTKFLVPGTPARFSGSLLGGKAALTLSGVQPEDEAEYYCTLWYSNRWVFGGGTKLTVLGGGGSGGGGSGGGGSEVQLVESGGGLVQPGGSLKLSCAASGFTFNKYAINWVRQAPGKGLEWVARIRSKYNNYATYYADQVKDRFTISRDDSKNTAYLQMNNLKTEDTAVYYCVRHANFGNSYISYWAYWGQGTLVTVSSGGGGSGGGSQVQLQESGGGLVQPGGSLRLSCAASGFAFGNHWMYWYRQAPGRGRELVASISSGGSTNYVDSVKGRFTISRDNARNTVYLQMYSLKPEDTAVYYCGTSDNWGQGTQVTVSSHHHHHH

SEQ ID NO: 918 - protein, 395 aa, Artificial Sequence
  Description of Artificial Sequence: Synthetic polypeptide
VVGGGGTQTVVTQEPSLTVSPGGTVTLTCASSTGAVTSGNYPNWVQQKPGQAPRGLIGGTKFLVPGTPARFSGSLLGGKAALTLSGVQPEDEAEYYCTLWYSNRWVFGGGTKLTVLGGGGSGGGGSGGGGSEVQLVESGGGLVQPGGSLKLSCAASGFTFNKYAINWVRQAPGKGLEWVARIRSKYNNYATYYADQVKDRFTISRDDSKNTAYLQMNNLKTEDTAVYYCVRHANFGNSYISYWAYWGQGTLVTVSSGGGGSGGGSQVQLQESGGGLVQPGGSLRLSCAASGDTFLRYAMGWFRQAPGKEREFVAAITWNGGNTDYAGSLKGRFTISRDNTKNTVYLQMNSLKPEDTAVYYCAADLTFGLASSHYQYDYWGQGTQVTVSSHHHHHH

SEQ ID NO: 919 - protein, 390 aa, Artificial Sequence
  Description of Artificial Sequence: Synthetic polypeptide
VVGGGGTQTVVTQEPSLTVSPGGTVTLTCASSTGAVTSGNYPNWVQQKPGQAPRGLIGGTKFLVPGTPARFSGSLLGGKAALTLSGVQPEDEAEYYCTLWYSNRWVFGGGTKLTVLGGGGSGGGGSGGGGSEVQLVESGGGLVQPGGSLKLSCAASGFTFNKYAINWVRQAPGKGLEWVARIRSKYNNYATYYADQVKDRFTISRDDSKNTAYLQMNNLKTEDTAVYYCVRHANFGNSYISYWAYWGQGTLVTVSSGGGGSGGGSQVQLQESGGGLVQAGGSLRLSCAASGFIFRAASMDWYRQFPGNERESIATISSGGFTNYADSVKGRFTISRDNAKNTVYLQMNSLKPEDTAVYFCGATFLRSDGHHTINGQGTQVTVSSHHHHHH

SEQ ID NO: 920 - protein, 390 aa, Artificial Sequence
  Description of Artificial Sequence: Synthetic polypeptide
VVGGGGTQTVVTQEPSLTVSPGGTVTLTCASSTGAVTSGNYPNWVQQKPGQAPRGLIGGTKFLVPGTPARFSGSLLGGKAALTLSGVQPEDEAEYYCTLWYSNRWVFGGGTKLTVLGGGGSGGGGSGGGGSEVQLVESGGGLVQPGGSLKLSCAASGFTFNKYAINWVRQAPGKGLEWVARIRSKYNNYATYYADQVKDRFTISRDDSKNTAYLQMNNLKTEDTAVYYCVRHANFGNSYISYWAYWGQGTLVTVSSGGGGSGGGSQVQLQESGGGLVQAGGSLRLSCAASGFIFRAASMGWFRQSPGNERELVATVSSGGFTNYADSVKGRFTISRDNAKNTVYLQMNSLKPEDTAVYFCGATFVRSDGHHTIYGQGTQVTVSSHHHHHH

SEQ ID NO: 921 - protein, 390 aa, Artificial Sequence
  Description of Artificial Sequence: Synthetic polypeptide
VVGGGGTQTVVTQEPSLTVSPGGTVTLTCASSTGAVTSGNYPNWVQQKPGQAPRGLIGGTKFLVPGTPARFSGSLLGGKAALTLSGVQPEDEAEYYCTLWYSNRWVFGGGTKLTVLGGGGSGGGGSGGGGSEVQLVESGGGLVQPGGSLKLSCAASGFTFNKYAINWVRQAPGKGLEWVARIRSKYNNYATYYADQVKDRFTISRDDSKNTAYLQMNNLKTEDTAVYYCVRHANFGNSYISYWAYWGQGTLVTVSSGGGGSGGGSQVQLQESGGGLVQAGGSLRLSCVHSGSIFRASTMAWYRQAPGKQRELVAQIMSGGGTNYAGSVKGRFTISRDNANNTVYLQMNSLKPEDTAVYYCNAAQITSWGPKVYWGQGTQVTVSSHHHHHH

SEQ ID NO: 922 - protein, 383 aa, Artificial Sequence
  Description of Artificial Sequence: Synthetic polypeptide
VVGGGGTQTVVTQEPSLTVSPGGTVTLTCASSTGAVTSGNYPNWVQQKPGQAPRGLIGGTKFLVPGTPARFSGSLLGGKAALTLSGVQPEDEAEYYCTLWYSNRWVFGGGTKLTVLGGGGSGGGGSGGGGSEVQLVESGGGLVQPGGSLKLSCAASGFTFNKYAINWVRQAPGKGLEWVARIRSKYNNYATYYADQVKDRFTISRDDSKNTAYLQMNNLKTEDTAVYYCVRHANFGNSYISYWAYWGQGTLVTVSSGGGGSGGGSQVQLQESGGGLVQPGGSLRLSCAASGFTFSDWAMSWVRQAPGKGLEWVSSIHYGDHTTHYADFVKGRFTISRDDAKNTLYLQMNSLKPEDTAVYYCEKGTTRGQGTQVTVSSHHHHHH

SEQ ID NO: 923 - protein, 393 aa, Artificial Sequence
  Description of Artificial Sequence: Synthetic polypeptide
VVGGGGTQTVVTQEPSLTVSPGGTVTLTCASSTGAVTSGNYPNWVQQKPGQAPRGLIGGTKFLVPGTPARFSGSLLGGKAALTLSGVQPEDEAEYYCTLWYSNRWVFGGGTKLTVLGGGGSGGGGSGGGGSEVQLVESGGGLVQPGGSLKLSCAASGFTFNKYAINWVRQAPGKGLEWVARIRSKYNNYATYYADQVKDRFTISRDDSKNTAYLQMNNLKTEDTAVYYCVRHANFGNSYISYWAYWGQGTLVTVSSGGGGSGGGSQVQLQESGGGLVQPGASLRVSCAASEYILSMYRMAWYRQAPGKVRELVADMSSGGTTNYADFVKGRFTISRDNDRNTVYLQMNRLQPEDTAAYYCNVAGRTGPPSYDAFNNWGQGTQVTVSSHHHHHH

SEQ ID NO: 924 - protein, 390 aa, Artificial Sequence
  Description of Artificial Sequence: Synthetic polypeptide
VVGGGGTQTVVTQEPSLTVSPGGTVTLTCASSTGAVTSGNYPNWVQQKPGQAPRGLIGGTKFLVPGTPARFSGSLLGGKAALTLSGVQPEDEAEYYCTLWYSNRWVFGGGTKLTVLGGGGSGGGGSGGGGSEVQLVESGGGLVQPGGSLKLSCAASGFTFNKYAINWVRQAPGKGLEWVARIRSKYNNYATYYADQVKDRFTISRDDSKNTAYLQMNNLKTEDTAVYYCVRHANFGNSYISYWAYWGQGTLVTVSSGGGGSGGGSQVQLQESGGGLVQAGGSLRLSCAASGFIFRAASMDWYRQSPGTQPELVATISSTGFTNYANSVKGRFTISRDNAKNTVYLQMNSLKPEDTAVYFCGATFLRSDGQHSIYGQGTQVTVSSHHHHHH

SEQ ID NO: 925 - protein, 393 aa, Artificial Sequence
  Description of Artificial Sequence: Synthetic polypeptide
VVGGGGTQTVVTQEPSLTVSPGGTVTLTCASSTGAVTSGNYPNWVQQKPGQAPRGLIGGTKFLVPGTPARFSGSLLGGKAALTLSGVQPEDEAEYYCTLWYSNRWVFGGGTKLTVLGGGGSGGGGSGGGGSEVQLVESGGGLVQPGGSLKLSCAASGFTFNKYAINWVRQAPGKGLEWVARIRSKYNNYATYYADQVKDRFTISRDDSKNTAYLQMNNLKTEDTAVYYCVRHANFGNSYISYWAYWGQGTLVTVSSGGGGSGGGSQVQLQESGGGLVQPGGSLRLSCAASESISSFIAVGWYRQAPGKERELVAGINRSGFTYYTDSVKGRFSISRDNAKNTVLLQMTSLKPEDTAVYYCNAGGLYFSNAYTQGDYWGQGTQVTVSSHHHHHH

SEQ ID NO: 926 - protein, 390 aa, Artificial Sequence
  Description of Artificial Sequence: Synthetic polypeptide
VVGGGGTQTVVTQEPSLTVSPGGTVTLTCASSTGAVTSGNYPNWVQQKPGQAPRGLIGGTKFLVPGTPARFSGSLLGGKAALTLSGVQPEDEAEYYCTLWYSNRWVFGGGTKLTVLGGGGSGGGGSGGGGSEVQLVESGGGLVQPGGSLKLSCAASGFTFNKYAINWVRQAPGKGLEWVARIRSKYNNYATYYADQVKDRFTISRDDSKNTAYLQMNNLKTEDTAVYYCVRHANFGNSYISYWAYWGQGTLVTVSSGGGGSGGGSQVQLQESGGGLVQAGGSLKLSCAASGNVFRAATMAWYRQAPEKQREMVATIASGGTTNYADFVKGRFTISRDNAKNTVYLQMNTLKPEDTAVYYCNAGYLTSLGPKNYWGQGTQVTVSSHHHHHH

SEQ ID NO: 927 - protein, 383 aa, Artificial Sequence
  Description of Artificial Sequence: Synthetic polypeptide
VVGGGGTQTVVTQEPSLTVSPGGTVTLTCASSTGAVTSGNYPNWVQQKPGQAPRGLIGGTKFLVPGTPARFSGSLLGGKAALTLSGVQPEDEAEYYCTLWYSNRWVFGGGTKLTVLGGGGSGGGGSGGGGSEVQLVESGGGLVQPGGSLKLSCAASGFTFNKYAINWVRQAPGKGLEWVARIRSKYNNYATYYADQVKDRFTISRDDSKNTAYLQMNNLKTEDTAVYYCVRHANFGNSYISYWAYWGQGTLVTVSSGGGGSGGGSQVQLQESGGGSVQAGGSLRLSCAASGFTFSSYYMSWVRQAPGKGLEWVSGIHYTGDWTNYADSVKGRFTISRDNAKNELYLEMNNLKPEDTAVYYCARGSDKGQGTQVTVSSHHHHHH

SEQ ID NO: 928 - protein, 391 aa, Artificial Sequence
  Description of Artificial Sequence: Synthetic polypeptide
VVGGGGTQTVVTQEPSLTVSPGGTVTLTCASSTGAVTSGNYPNWVQQKPGQAPRGLIGGTKFLVPGTPARFSGSLLGGKAALTLSGVQPEDEAEYYCTLWYSNRWVFGGGTKLTVLGGGGSGGGGSGGGGSEVQLVESGGGLVQPGGSLKLSCAASGFTFNKYAINWVRQAPGKGLEWVARIRSKYNNYATYYADQVKDRFTISRDDSKNTAYLQMNNLKTEDTAVYYCVRHANFGNSYISYWAYWGQGTLVTVSSGGGGSGGGSQVQLQESGGGLVQAGGSLRLSCAPSGRTSSIFGMGWFRQAPGKEREFVASINWSGGSTSYADSVKGRFTISRDNAKNEMYLQMNSLKFEDTAVYVCAAAVLTNKPSWNFWGQGTQVTVSSHHHHHH

SEQ ID NO: 929 - protein, 392 aa, Artificial Sequence
  Description of Artificial Sequence: Synthetic polypeptide
VVGGGGTQTVVTQEPSLTVSPGGTVTLTCASSTGAVTSGNYPNWVQQKPGQAPRGLIGGTKFLVPGTPARFSGSLLGGKAALTLSGVQPEDEAEYYCTLWYSNRWVFGGGTKLTVLGGGGSGGGGSGGGGSEVQLVESGGGLVQPGGSLKLSCAASGFTFNKYAINWVRQAPGKGLEWVARIRSKYNNYATYYADQVKDRFTISRDDSKNTAYLQMNNLKTEDTAVYYCVRHANFGNSYISYWAYWGQGTLVTVSSGGGGSGGGSQVQLQESGGGLVQAGGSLRLSCAASGPIFSDTIRTMGWYRQAAGKQRELVATIASFPSRTNYVDSVKGRFTISRDIAKNTVYLQMDSLKPEDTAVYYCNVDLASIPTKTYWGQGTQVTVSSHHHHHH

SEQ ID NO: 930 - protein, 391 aa, Artificial Sequence
  Description of Artificial Sequence: Synthetic polypeptide
VVGGGGTQTVVTQEPSLTVSPGGTVTLTCASSTGAVTSGNYPNWVQQKPGQAPRGLIGGTKFLVPGTPARFSGSLLGGKAALTLSGVQPEDEAEYYCTLWYSNRWVFGGGTKLTVLGGGGSGGGGSGGGGSEVQLVESGGGLVQPGGSLKLSCAASGFTFNKYAINWVRQAPGKGLEWVARIRSKYNNYATYYADQVKDRFTISRDDSKNTAYLQMNNLKTEDTAVYYCVRHANFGNSYISYWAYWGQGTLVTVSSGGGGSGGGSQVQLQESGGGLVQAGGSLRLSCAASGSIFGINAMGWYRQAPGKQRESVAFITIGGNTNYLDSVKGRFTISRDNAKNTVYLQMNGLKPEDTAVYYCNTNPPLILTAGGLYWGQGTQVTVSSHHHHHH

SEQ ID NO: 931 - protein, 392 aa, Artificial Sequence
  Description of Artificial Sequence: Synthetic polypeptide
VVGGGGTQTVVTQEPSLTVSPGGTVTLTCASSTGAVTSGNYPNWVQQKPGQAPRGLIGGTKFLVPGTPARFSGSLLGGKAALTLSGVQPEDEAEYYCTLWYSNRWVFGGGTKLTVLGGGGSGGGGSGGGGSEVQLVESGGGLVQPGGSLKLSCAASGFTFNKYAINWVRQAPGKGLEWVARIRSKYNNYATYYADQVKDRFTISRDDSKNTAYLQMNNLKTEDTAVYYCVRHANFGNSYISYWAYWGQGTLVTVSSGGGGSGGGSQVQLQESGGGLVQPGGSLRLSCATSANRFNINVMGWYRQAPGQQRELVATINIGGSTDYADSVKGRFTISRDNAKNTVYLQLSDLKPEDTAVYYCNVKLRVSGPTGPNVYWGQGTQVTVSSHHHHHH

SEQ ID NO: 932 - protein, 387 aa, Artificial Sequence
  Description of Artificial Sequence: Synthetic polypeptide
VVGGGGTQTVVTQEPSLTVSPGGTVTLTCASSTGAVTSGNYPNWVQQKPGQAPRGLIGGTKFLVPGTPARFSGSLLGGKAALTLSGVQPEDEAEYYCTLWYSNRWVFGGGTKLTVLGGGGSGGGGSGGGGSEVQLVESGGGLVQPGGSLKLSCAASGFTFNKYAINWVRQAPGKGLEWVARIRSKYNNYATYYADQVKDRFTISRDDSKNTAYLQMNNLKTEDTAVYYCVRHANFGNSYISYWAYWGQGTLVTVSSGGGGSGGGSQVQLQESGGGLVQAGGSLKLSCTASGTILSTMAWYRQAPGKQRELVATISRGGTTNYSDSVKGRFAISRDSTKNTVYLQMNSLKPEDTAVYYCNTPLTDYGMGYNWGQGTQVTVSSHHHHHH

SEQ ID NO: 933 - protein, 391 aa, Artificial Sequence
  Description of Artificial Sequence: Synthetic polypeptide
VVGGGGTQTVVTQEPSLTVSPGGTVTLTCASSTGAVTSGNYPNWVQQKPGQAPRGLIGGTKFLVPGTPARFSGSLLGGKAALTLSGVQPEDEAEYYCTLWYSNRWVFGGGTKLTVLGGGGSGGGGSGGGGSEVQLVESGGGLVQPGGSLKLSCAASGFTFNKYAINWVRQAPGKGLEWVARIRSKYNNYATYYADQVKDRFTISRDDSKNTAYLQMNNLKTEDTAVYYCVRHANFGNSYISYWAYWGQGTLVTVSSGGGGSGGGSQVQLQESGGGLVQAGGSLRLSCAVSGSIFSLNTLAWYRQAPGRQRDLIARITGGGTTVYADSVKGRFTISRDNAKNTVYLQMNSLKPEDTAVYYCNLMVRHPSGSTYEYWGQGTQVTVSSHHHHHH

SEQ ID NO: 934 - protein, 383 aa, Artificial Sequence
  Description of Artificial Sequence: Synthetic polypeptide
VVGGGGTQTVVTQEPSLTVSPGGTVTLTCASSTGAVTSGNYPNWVQQKPGQAPRGLIGGTKFLVPGTPARFSGSLLGGKAALTLSGVQPEDEAEYYCTLWYSNRWVFGGGTKLTVLGGGGSGGGGSGGGGSEVQLVESGGGLVQPGGSLKLSCAASGFTFNKYAINWVRQAPGKGLEWVARIRSKYNNYATYYADQVKDRFTISRDDSKNTAYLQMNNLKTEDTAVYYCVRHANFGNSYISYWAYWGQGTLVTVSSGGGGSGGGSQVQLQESGGGLVQPGGSLRLSCAASGFTFSDWAMSWVRQAPGKGLEWVSGIHYGDHTTHYADFVKGRFTISRDDAKNTLYLQMNSLKPEDTAVYYCARGSTKGQGTQVTVSSHHHHHH

SEQ ID NO: 935 - protein, 390 aa, Artificial Sequence
  Description of Artificial Sequence: Synthetic polypeptide
VVGGGGTQTVVTQEPSLTVSPGGTVTLTCASSTGAVTSGNYPNWVQQKPGQAPRGLIGGTKFLVPGTPARFSGSLLGGKAALTLSGVQPEDEAEYYCTLWYSNRWVFGGGTKLTVLGGGGSGGGGSGGGGSEVQLVESGGGLVQPGGSLKLSCAASGFTFNKYAINWVRQAPGKGLEWVARIRSKYNNYATYYADQVKDRFTISRDDSKNTAYLQMNNLKTEDTAVYYCVRHANFGNSYISYWAYWGQGTLVTVSSGGGGSGGGSQVQLQESGGGLVQAGGSLRLSCAASGFIFRAASMAWYRQSPGNERELVASISSGAFTNYADSVKARFTISRDNAKNTVYLQMNSLKPEDTAVYFCGATFLRSDGHHTINGQGTQVTVSSHHHHHH

SEQ ID NO: 936 - protein, 390 aa, Artificial Sequence
  Description of Artificial Sequence: Synthetic polypeptide
VVGGGGTQTVVTQEPSLTVSPGGTVTLTCASSTGAVTSGNYPNWVQQKPGQAPRGLIGGTKFLVPGTPARFSGSLLGGKAALTLSGVQPEDEAEYYCTLWYSNRWVFGGGTKLTVLGGGGSGGGGSGGGGSEVQLVESGGGLVQPGGSLKLSCAASGFTFNKYAINWVRQAPGKGLEWVARIRSKYNNYATYYADQVKDRFTISRDDSKNTAYLQMNNLKTEDTAVYYCVRHANFGNSYISYWAYWGQGTLVTVSSGGGGSGGGSQVQLQESGGGLVQAGGSLRLSCAASGIIFRGTTMGWFRQAPGKQRESVASISPLGTTSYSGSVEGRFTVSRDNAKNTLFLQMNSLKSEDTAVYYCNAIQVTNVGPRVYWGQGTQVTVSSHHHHHH

SEQ ID NO: 937 - protein, 387 aa, Artificial Sequence
  Description of Artificial Sequence: Synthetic polypeptide
GGGSQVQLQESGGGLVQAGGSLRLSCAASGSVFRANVMGWYRQAPGKQHELVARIDPGGTTTYADPVKGRFTISRDNAKKTVYLQMNSLKPDDTAVYYCNAIILLSGGPKDYWGQGTQVTVSSGGGGSGGGSEVQLVESGGGLVQPGGSLKLSCAASGFTFNKYAINWVRQAPGKGLEWVARIRSKYNNYATYYADQVKDRFTISRDDSKNTAYLQMNNLKTEDTAVYYCVRHANFGNSYISYWAYWGQGTLVTVSSGGGGSGGGGSGGGGSQTVVTQEPSLTVSPGGTVTLTCASSTGAVTSGNYPNWVQQKPGQAPRGLIGGTKFLVPGTPARFSGSLLGGKAALTLSGVQPEDEAEYYCTLWYSNRWVFGGGTKLTVLHHHHHH

SEQ ID NO: 938 - protein, 392 aa, Artificial Sequence
  Description of Artificial Sequence: Synthetic polypeptide
GGGSQVQLQESGGGLVQPGGSLRLSCASSGFTLDDYTIGWFRQAPGKEREGVSCISRRDDSTYYADSVKGRFTISRDNAKNTVDLQMISLRPEDTAVYYCAATPRSYTLRCLGKFDFQGQGTQVTVSSGGGGSGGGSEVQLVESGGGLVQPGGSLKLSCAASGFTFNKYAINWVRQAPGKGLEWVARIRSKYNNYATYYADQVKDRFTISRDDSKNTAYLQMNNLKTEDTAVYYCVRHANFGNSYISYWAYWGQGTLVTVSSGGGGSGGGGSGGGGSQTVVTQEPSLTVSPGGTVTLTCASSTGAVTSGNYPNWVQQKPGQAPRGLIGGTKFLVPGTPARFSGSLLGGKAALTLSGVQPEDEAEYYCTLWYSNRWVFGGGTKLTVLHHHHHH

SEQ ID NO: 939 - protein, 389 aa, Artificial Sequence
  Description of Artificial Sequence: Synthetic polypeptide
GGGSQVQLQESGGGLVQAGGSLRLSCAASGNIVRMTNMAWYRQAPGKQREFVATISAGGSTTYVDSVKDRFTISRDNTKNTVYLQMNYLKPEDTAVYYCATGSILTNRGAIPGSWGHGTQVTVSSGGGGSGGGSEVQLVESGGGLVQPGGSLKLSCAASGFTFNKYAINWVRQAPGKGLEWVARIRSKYNNYATYYADQVKDRFTISRDDSKNTAYLQMNNLKTEDTAVYYCVRHANFGNSYISYWAYWGQGTLVTVSSGGGGSGGGGSGGGGSQTVVTQEPSLTVSPGGTVTLTCASSTGAVTSGNYPNWVQQKPGQAPRGLIGGTKFLVPGTPARFSGSLLGGKAALTLSGVQPEDEAEYYCTLWYSNRWVFGGGTKLTVLHHHHHH

SEQ ID NO: 940 - protein, 387 aa, Artificial Sequence
  Description of Artificial Sequence: Synthetic polypeptide
GGGSQVQLQESGGGLVQAGGSLRLSCAASGFIFRAASISWYRQSPGNERELVATINSGGFTNYADSVLGRFTISRDNAKNTGYLQMNSLKPEDTAVYFCAATFLRSDGQPPIWGQGTQVTVSSGGGGSGGGSEVQLVESGGGLVQPGGSLKLSCAASGFTFNKYAINWVRQAPGKGLEWVARIRSKYNNYATYYADQVKDRFTISRDDSKNTAYLQMNNLKTEDTAVYYCVRHANFGNSYISYWAYWGQGTLVTVSSGGGGSGGGGSGGGGSQTVVTQEPSLTVSPGGTVTLTCASSTGAVTSGNYPNWVQQKPGQAPRGLIGGTKFLVPGTPARFSGSLLGGKAALTLSGVQPEDEAEYYCTLWYSNRWVFGGGTKLTVLHHHHHH

SEQ ID NO: 941 - protein, 387 aa, Artificial Sequence
  Description of Artificial Sequence: Synthetic polypeptide
GGGSQVQLQESGGGLVQAGGSLRLSCAASGNVFRAATMAWYRQVPEKQREMVATIASGGTTNYADFVKGRFTISRDNAKNTVYLQMNTLKPEDTAVYYCNALYLTSLGPKSYWGQGTQVTVSSGGGGSGGGSEVQLVESGGGLVQPGGSLKLSCAASGFTFNKYAINWVRQAPGKGLEWVARIRSKYNNYATYYADQVKDRFTISRDDSKNTAYLQMNNLKTEDTAVYYCVRHANFGNSYISYWAYWGQGTLVTVSSGGGGSGGGGSGGGGSQTVVTQEPSLTVSPGGTVTLTCASSTGAVTSGNYPNWVQQKPGQAPRGLIGGTKFLVPGTPARFSGSLLGGKAALTLSGVQPEDEAEYYCTLWYSNRWVFGGGTKLTVLHHHHHH

SEQ ID NO: 942 - protein, 395 aa, Artificial Sequence
  Description of Artificial Sequence: Synthetic polypeptide
GGGSQVQLQESGGGLVQAGGSLRLSCAAPGFAFNDHAILWFRQAPGKEREGVSEICRDGTTYYTDSVKGRFTISSDNAKNTVYLQMNSVKTDDTAVYYCAVDRRRYYCSGNRAFSSDYYYWGQGTQVTVSSGGGGSGGGSEVQLVESGGGLVQPGGSLKLSCAASGFTFNKYAINWVRQAPGKGLEWVARIRSKYNNYATYYADQVKDRFTISRDDSKNTAYLQMNNLKTEDTAVYYCVRHANFGNSYISYWAYWGQGTLVTVSSGGGGSGGGGSGGGGSQTVVTQEPSLTVSPGGTVTLTCASSTGAVTSGNYPNWVQQKPGQAPRGLIGGTKFLVPGTPARFSGSLLGGKAALTLSGVQPEDEAEYYCTLWYSNRWVFGGGTKLTVLHHHHHH

SEQ ID NO: 943 - protein, 379 aa, Artificial Sequence
  Description of Artificial Sequence: Synthetic polypeptide
GGGSQVQLQESGGGLVQPGGSLRLSCAASGFAFGNHWMYWYRQAPGRGRELVASISSGGSTNYVDSVKGRFTISRDNARNTVYLQMYSLKPEDTAVYYCGTSDNWGQGTQVTVSSGGGGSGGGSEVQLVESGGGLVQPGGSLKLSCAASGFTFNKYAINWVRQAPGKGLEWVARIRSKYNNYATYYADQVKDRFTISRDDSKNTAYLQMNNLKTEDTAVYYCVRHANFGNSYISYWAYWGQGTLVTVSSGGGGSGGGGSGGGGSQTVVTQEPSLTVSPGGTVTLTCASSTGAVTSGNYPNWVQQKPGQAPRGLIGGTKFLVPGTPARFSGSLLGGKAALTLSGVQPEDEAEYYCTLWYSNRWVFGGGTKLTVLHHHHHH

SEQ ID NO: 944 - protein, 392 aa, Artificial Sequence
  Description of Artificial Sequence: Synthetic polypeptide
GGGSQVQLQESGGGLVQPGGSLRLSCAASGDTFLRYAMGWFRQAPGKEREFVAAITWNGGNTDYAGSLKGRFTISRDNTKNTVYLQMNSLKPEDTAVYYCAADLTFGLASSHYQYDYWGQGTQVTVSSGGGGSGGGSEVQLVESGGGLVQPGGSLKLSCAASGFTFNKYAINWVRQAPGKGLEWVARIRSKYNNYATYYADQVKDRFTISRDDSKNTAYLQMNNLKTEDTAVYYCVRHANFGNSYISYWAYWGQGTLVTVSSGGGGSGGGGSGGGGSQTVVTQEPSLTVSPGGTVTLTCASSTGAVTSGNYPNWVQQKPGQAPRGLIGGTKFLVPGTPARFSGSLLGGKAALTLSGVQPEDEAEYYCTLWYSNRWVFGGGTKLTVLHHHHHH

SEQ ID NO: 945 - protein, 387 aa, Artificial Sequence
  Description of Artificial Sequence: Synthetic polypeptide
GGGSQVQLQESGGGLVQAGGSLRLSCAASGFIFRAASMDWYRQFPGNERESIATISSGGFTNYADSVKGRFTISRDNAKNTVYLQMNSLKPEDTAVYFCGATFLRSDGHHTINGQGTQVTVSSGGGGSGGGSEVQLVESGGGLVQPGGSLKLSCAASGFTFNKYAINWVRQAPGKGLEWVARIRSKYNNYATYYADQVKDRFTISRDDSKNTAYLQMNNLKTEDTAVYYCVRHANFGNSYISYWAYWGQGTLVTVSSGGGGSGGGGSGGGGSQTVVTQEPSLTVSPGGTVTLTCASSTGAVTSGNYPNWVQQKPGQAPRGLIGGTKFLVPGTPARFSGSLLGGKAALTLSGVQPEDEAEYYCTLWYSNRWVFGGGTKLTVLHHHHHH

SEQ ID NO: 946 - protein, 387 aa, Artificial Sequence
  Description of Artificial Sequence: Synthetic polypeptide
GGGSQVQLQESGGGLVQAGGSLRLSCAASGFIFRAASMGWFRQSPGNERELVATVSSGGFTNYADSVKGRFTISRDNAKNTVYLQMNSLKPEDTAVYFCGATFVRSDGHHTIYGQGTQVTVSSGGGGSGGGSEVQLVESGGGLVQPGGSLKLSCAASGFTFNKYAINWVRQAPGKGLEWVARIRSKYNNYATYYADQVKDRFTISRDDSKNTAYLQMNNLKTEDTAVYYCVRHANFGNSYISYWAYWGQGTLVTVSSGGGGSGGGGSGGGGSQTVVTQEPSLTVSPGGTVTLTCASSTGAVTSGNYPNWVQQKPGQAPRGLIGGTKFLVPGTPARFSGSLLGGKAALTLSGVQPEDEAEYYCTLWYSNRWVFGGGTKLTVLHHHHHH

SEQ ID NO: 947 - skipped

SEQ ID NO: 948 - protein, 387 aa, Artificial Sequence
  Description of Artificial Sequence: Synthetic polypeptide
GGGSQVQLQESGGGLVQAGGSLRLSCVHSGSIFRASTMAWYRQAPGKQRELVAQIMSGGGTNYAGSVKGRFTISRDNANNTVYLQMNSLKPEDTAVYYCNAAQITSWGPKVYWGQGTQVTVSSGGGGSGGGSEVQLVESGGGLVQPGGSLKLSCAASGFTFNKYAINWVRQAPGKGLEWVARIRSKYNNYATYYADQVKDRFTISRDDSKNTAYLQMNNLKTEDTAVYYCVRHANFGNSYISYWAYWGQGTLVTVSSGGGGSGGGGSGGGGSQTVVTQEPSLTVSPGGTVTLTCASSTGAVTSGNYPNWVQQKPGQAPRGLIGGTKFLVPGTPARFSGSLLGGKAALTLSGVQPEDEAEYYCTLWYSNRWVFGGGTKLTVLHHHHHH

SEQ ID NO: 949 - protein, 380 aa, Artificial Sequence
  Description of Artificial Sequence: Synthetic polypeptide
GGGSQVQLQESGGGLVQPGGSLRLSCAASGFTFSDWAMSWVRQAPGKGLEWVSSIHYGDHTTHYADFVKGRFTISRDDAKNTLYLQMNSLKPEDTAVYYCEKGTTRGQGTQVTVSSGGGGSGGGSEVQLVESGGGLVQPGGSLKLSCAASGFTFNKYAINWVRQAPGKGLEWVARIRSKYNNYATYYADQVKDRFTISRDDSKNTAYLQMNNLKTEDTAVYYCVRHANFGNSYISYWAYWGQGTLVTVSSGGGGSGGGGSGGGGSQTVVTQEPSLTVSPGGTVTLTCASSTGAVTSGNYPNWVQQKPGQAPRGLIGGTKFLVPGTPARFSGSLLGGKAALTLSGVQPEDEAEYYCTLWYSNRWVFGGGTKLTVLHHHHHH

SEQ ID NO: 950 - protein, 390 aa, Artificial Sequence
  Description of Artificial Sequence: Synthetic polypeptide
GGGSQVQLQESGGGLVQPGASLRVSCAASEYILSMYRMAWYRQAPGKVRELVADMSSGGTTNYADFVKGRFTISRDNDRNTVYLQMNRLQPEDTAAYYCNVAGRTGPPSYDAFNNWGQGTQVTVSSGGGGSGGGSEVQLVESGGGLVQPGGSLKLSCAASGFTFNKYAINWVRQAPGKGLEWVARIRSKYNNYATYYADQVKDRFTISRDDSKNTAYLQMNNLKTEDTAVYYCVRHANFGNSYISYWAYWGQGTLVTVSSGGGGSGGGGSGGGGSQTVVTQEPSLTVSPGGTVTLTCASSTGAVTSGNYPNWVQQKPGQAPRGLIGGTKFLVPGTPARFSGSLLGGKAALTLSGVQPEDEAEYYCTLWYSNRWVFGGGTKLTVLHHHHHH

SEQ ID NO: 951 - protein, 387 aa, Artificial Sequence
  Description of Artificial Sequence: Synthetic polypeptide
GGGSQVQLQESGGGLVQAGGSLRLSCAASGFIFRAASMDWYRQSPGTQPELVATISSTGFTNYANSVKGRFTISRDNAKNTVYLQMNSLKPEDTAVYFCGATFLRSDGQHSIYGQGTQVTVSSGGGGSGGGSEVQLVESGGGLVQPGGSLKLSCAASGFTFNKYAINWVRQAPGKGLEWVARIRSKYNNYATYYADQVKDRFTISRDDSKNTAYLQMNNLKTEDTAVYYCVRHANFGNSYISYWAYWGQGTLVTVSSGGGGSGGGGSGGGGSQTVVTQEPSLTVSPGGTVTLTCASSTGAVTSGNYPNWVQQKPGQAPRGLIGGTKFLVPGTPARFSGSLLGGKAALTLSGVQPEDEAEYYCTLWYSNRWVFGGGTKLTVLHHHHHH

SEQ ID NO: 952 - protein, 390 aa, Artificial Sequence
  Description of Artificial Sequence: Synthetic polypeptide
GGGSQVQLQESGGGLVQPGGSLRLSCAASGRINSINTMGWYRQAPGNQRELVAEITRGGTTNYADSVQGRYAISRDNAKNLVYLQMNSLKPEDTDVYYCNAQTFPTFSRPTGLDYWGQGTQVTVSSGGGGSGGGSEVQLVESGGGLVQPGGSLKLSCAASGFTFNKYAINWVRQAPGKGLEWVARIRSKYNNYATYYADQVKDRFTISRDDSKNTAYLQMNNLKTEDTAVYYCVRHANFGNSYISYWAYWGQGTLVTVSSGGGGSGGGGSGGGGSQTVVTQEPSLTVSPGGTVTLTCASSTGAVTSGNYPNWVQQKPGQAPRGLIGGTKFLVPGTPARFSGSLLGGKAALTLSGVQPEDEAEYYCTLWYSNRWVFGGGTKLTVLHHHHHH

SEQ ID NO: 953 - protein, 390 aa, Artificial Sequence
  Description of Artificial Sequence: Synthetic polypeptide
GGGSQVQLQESGGGLVQPGGSLRLSCAASESISSFIAVGWYRQAPGKERELVAGINRSGFTYYTDSVKGRFSISRDNAKNTVLLQMTSLKPEDTAVYYCNAGGLYFSNAYTQGDYWGQGTQVTVSSGGGGSGGGSEVQLVESGGGLVQPGGSLKLSCAASGFTFNKYAINWVRQAPGKGLEWVARIRSKYNNYATYYADQVKDRFTISRDDSKNTAYLQMNNLKTEDTAVYYCVRHANFGNSYISYWAYWGQGTLVTVSSGGGGSGGGGSGGGGSQTVVTQEPSLTVSPGGTVTLTCASSTGAVTSGNYPNWVQQKPGQAPRGLIGGTKFLVPGTPARFSGSLLGGKAALTLSGVQPEDEAEYYCTLWYSNRWVFGGGTKLTVLHHHHHH

SEQ ID NO: 954 - protein, 387 aa, Artificial Sequence
  Description of Artificial Sequence: Synthetic polypeptide
GGGSQVQLQESGGGLVQAGGSLKLSCAASGNVFRAATMAWYRQAPEKQREMVATIASGGTTNYADFVKGRFTISRDNAKNTVYLQMNTLKPEDTAVYYCNAGYLTSLGPKNYWGQGTQVTVSSGGGGSGGGSEVQLVESGGGLVQPGGSLKLSCAASGFTFNKYAINWVRQAPGKGLEWVARIRSKYNNYATYYADQVKDRFTISRDDSKNTAYLQMNNLKTEDTAVYYCVRHANFGNSYISYWAYWGQGTLVTVSSGGGGSGGGGSGGGGSQTVVTQEPSLTVSPGGTVTLTCASSTGAVTSGNYPNWVQQKPGQAPRGLIGGTKFLVPGTPARFSGSLLGGKAALTLSGVQPEDEAEYYCTLWYSNRWVFGGGTKLTVLHHHHHH

SEQ ID NO: 955 - protein, 380 aa, Artificial Sequence
  Description of Artificial Sequence: Synthetic polypeptide
GGGSQVQLQESGGGSVQAGGSLRLSCAASGFTFSSYYMSWVRQAPGKGLEWVSGIHYTGDWTNYADSVKGRFTISRDNAKNELYLEMNNLKPEDTAVYYCARGSDKGQGTQVTVSSGGGGSGGGSEVQLVESGGGLVQPGGSLKLSCAASGFTFNKYAINWVRQAPGKGLEWVARIRSKYNNYATYYADQVKDRFTISRDDSKNTAYLQMNNLKTEDTAVYYCVRHANFGNSYISYWAYWGQGTLVTVSSGGGGSGGGGSGGGGSQTVVTQEPSLTVSPGGTVTLTCASSTGAVTSGNYPNWVQQKPGQAPRGLIGGTKFLVPGTPARFSGSLLGGKAALTLSGVQPEDEAEYYCTLWYSNRWVFGGGTKLTVLHHHHHH

SEQ ID NO: 956 - protein, 388 aa, Artificial Sequence
  Description of Artificial Sequence: Synthetic polypeptide
GGGSQVQLQESGGGLVQAGGSLRLSCAPSGRTSSIFGMGWFRQAPGKEREFVASINWSGGSTSYADSVKGRFTISRDNAKNEMYLQMNSLKFEDTAVYVCAAAVLTNKPSWNFWGQGTQVTVSSGGGGSGGGSEVQLVESGGGLVQPGGSLKLSCAASGFTFNKYAINWVRQAPGKGLEWVARIRSKYNNYATYYADQVKDRFTISRDDSKNTAYLQMNNLKTEDTAVYYCVRHANFGNSYISYWAYWGQGTLVTVSSGGGGSGGGGSGGGGSQTVVTQEPSLTVSPGGTVTLTCASSTGAVTSGNYPNWVQQKPGQAPRGLIGGTKFLVPGTPARFSGSLLGGKAALTLSGVQPEDEAEYYCTLWYSNRWVFGGGTKLTVLHHHHHH

SEQ ID NO: 957 - protein, 389 aa, Artificial Sequence
  Description of Artificial Sequence: Synthetic polypeptide
GGGSQVQLQESGGGLVQAGGSLRLSCAASGPIFSDTIRTMGWYRQAAGKQRELVATIASFPSRTNYVDSVKGRFTISRDIAKNTVYLQMDSLKPEDTAVYYCNVDLASIPTKTYWGQGTQVTVSSGGGGSGGGSEVQLVESGGGLVQPGGSLKLSCAASGFTFNKYAINWVRQAPGKGLEWVARIRSKYNNYATYYADQVKDRFTISRDDSKNTAYLQMNNLKTEDTAVYYCVRHANFGNSYISYWAYWGQGTLVTVSSGGGGSGGGGSGGGGSQTVVTQEPSLTVSPGGTVTLTCASSTGAVTSGNYPNWVQQKPGQAPRGLIGGTKFLVPGTPARFSGSLLGGKAALTLSGVQPEDEAEYYCTLWYSNRWVFGGGTKLTVLHHHHHH

SEQ ID NO: 958 - protein, 388 aa, Artificial Sequence
  Description of Artificial Sequence: Synthetic polypeptide
GGGSQVQLQESGGGLVQAGGSLRLSCAASGSIFGINAMGWYRQAPGKQRESVAFITIGGNTNYLDSVKGRFTISRDNAKNTVYLQMNGLKPEDTAVYYCNTNPPLILTAGGLYWGQGTQVTVSSGGGGSGGGSEVQLVESGGGLVQPGGSLKLSCAASGFTFNKYAINWVRQAPGKGLEWVARIRSKYNNYATYYADQVKDRFTISRDDSKNTAYLQMNNLKTEDTAVYYCVRHANFGNSYISYWAYWGQGTLVTVSSGGGGSGGGGSGGGGSQTVVTQEPSLTVSPGGTVTLTCASSTGAVTSGNYPNWVQQKPGQAPRGLIGGTKFLVPGTPARFSGSLLGGKAALTLSGVQPEDEAEYYCTLWYSNRWVFGGGTKLTVLHHHHHH

SEQ ID NO: 959 - protein, 389 aa, Artificial Sequence
  Description of Artificial Sequence: Synthetic polypeptide
GGGSQVQLQESGGGLVQPGGSLRLSCATSANRFNINVMGWYRQAPGQQRELVATINIGGSTDYADSVKGRFTISRDNAKNTVYLQLSDLKPEDTAVYYCNVKLRVSGPTGPNVYWGQGTQVTVSSGGGGSGGGSEVQLVESGGGLVQPGGSLKLSCAASGFTFNKYAINWVRQAPGKGLEWVARIRSKYNNYATYYADQVKDRFTISRDDSKNTAYLQMNNLKTEDTAVYYCVRHANFGNSYISYWAYWGQGTLVTVSSGGGGSGGGGSGGGGSQTVVTQEPSLTVSPGGTVTLTCASSTGAVTSGNYPNWVQQKPGQAPRGLIGGTKFLVPGTPARFSGSLLGGKAALTLSGVQPEDEAEYYCTLWYSNRWVFGGGTKLTVLHHHHHH

SEQ ID NO: 960 - protein, 384 aa, Artificial Sequence
  Description of Artificial Sequence: Synthetic polypeptide
GGGSQVQLQESGGGLVQAGGSLKLSCTASGTILSTMAWYRQAPGKQRELVATISRGGTTNYSDSVKGRFAISRDSTKNTVYLQMNSLKPEDTAVYYCNTPLTDYGMGYNWGQGTQVTVSSGGGGSGGGSEVQLVESGGGLVQPGGSLKLSCAASGFTFNKYAINWVRQAPGKGLEWVARIRSKYNNYATYYADQVKDRFTISRDDSKNTAYLQMNNLKTEDTAVYYCVRHANFGNSYISYWAYWGQGTLVTVSSGGGGSGGGGSGGGGSQTVVTQEPSLTVSPGGTVTLTCASSTGAVTSGNYPNWVQQKPGQAPRGLIGGTKFLVPGTPARFSGSLLGGKAALTLSGVQPEDEAEYYCTLWYSNRWVFGGGTKLTVLHHHHHH

SEQ ID NO: 961 - protein, 388 aa, Artificial Sequence
  Description of Artificial Sequence: Synthetic polypeptide
GGGSQVQLQESGGGLVQAGGSLRLSCAVSGSIFSLNTLAWYRQAPGRQRDLIARITGGGTTVYADSVKGRFTISRDNAKNTVYLQMNSLKPEDTAVYYCNLMVRHPSGSTYEYWGQGTQVTVSSGGGGSGGGSEVQLVESGGGLVQPGGSLKLSCAASGFTFNKYAINWVRQAPGKGLEWVARIRSKYNNYATYYADQVKDRFTISRDDSKNTAYLQMNNLKTEDTAVYYCVRHANFGNSYISYWAYWGQGTLVTVSSGGGGSGGGGSGGGGSQTVVTQEPSLTVSPGGTVTLTCASSTGAVTSGNYPNWVQQKPGQAPRGLIGGTKFLVPGTPARFSGSLLGGKAALTLSGVQPEDEAEYYCTLWYSNRWVFGGGTKLTVLHHHHHH

SEQ ID NO: 962 - protein, 380 aa, Artificial Sequence
  Description of Artificial Sequence: Synthetic polypeptide
GGGSQVQLQESGGGLVQPGGSLRLSCAASGFTFSDWAMSWVRQAPGKGLEWVSGIHYGDHTTHYADFVKGRFTISRDDAKNTLYLQMNSLKPEDTAVYYCARGSTKGQGTQVTVSSGGGGSGGGSEVQLVESGGGLVQPGGSLKLSCAASGFTFNKYAINWVRQAPGKGLEWVARIRSKYNNYATYYADQVKDRFTISRDDSKNTAYLQMNNLKTEDTAVYYCVRHANFGNSYISYWAYWGQGTLVTVSSGGGGSGGGGSGGGGSQTVVTQEPSLTVSPGGTVTLTCASSTGAVTSGNYPNWVQQKPGQAPRGLIGGTKFLVPGTPARFSGSLLGGKAALTLSGVQPEDEAEYYCTLWYSNRWVFGGGTKLTVLHHHHHH

SEQ ID NO: 963 - protein, 387 aa, Artificial Sequence
  Description of Artificial Sequence: Synthetic polypeptide
GGGSQVQLQESGGGLVQAGGSLRLSCAASGFIFRAASMAWYRQSPGNERELVASISSGAFTNYADSVKARFTISRDNAKNTVYLQMNSLKPEDTAVYFCGATFLRSDGHHTINGQGTQVTVSSGGGGSGGGSEVQLVESGGGLVQPGGSLKLSCAASGFTFNKYAINWVRQAPGKGLEWVARIRSKYNNYATYYADQVKDRFTISRDDSKNTAYLQMNNLKTEDTAVYYCVRHANFGNSYISYWAYWGQGTLVTVSSGGGGSGGGGSGGGGSQTVVTQEPSLTVSPGGTVTLTCASSTGAVTSGNYPNWVQQKPGQAPRGLIGGTKFLVPGTPARFSGSLLGGKAALTLSGVQPEDEAEYYCTLWYSNRWVFGGGTKLTVLHHHHHH

SEQ ID NO: 964 - protein, 387 aa, Artificial Sequence
  Description of Artificial Sequence: Synthetic polypeptide
GGGSQVQLQESGGGLVQAGGSLRLSCAASGIIFRGTTMGWFRQAPGKQRESVASISPLGTTSYSGSVEGRFTVSRDNAKNTLFLQMNSLKSEDTAVYYCNAIQVTNVGPRVYWGQGTQVTVSSGGGGSGGGSEVQLVESGGGLVQPGGSLKLSCAASGFTFNKYAINWVRQAPGKGLEWVARIRSKYNNYATYYADQVKDRFTISRDDSKNTAYLQMNNLKTEDTAVYYCVRHANFGNSYISYWAYWGQGTLVTVSSGGGGSGGGGSGGGGSQTVVTQEPSLTVSPGGTVTLTCASSTGAVTSGNYPNWVQQKPGQAPRGLIGGTKFLVPGTPARFSGSLLGGKAALTLSGVQPEDEAEYYCTLWYSNRWVFGGGTKLTVLHHHHHH

SEQ ID NO: 965 - protein, 111 aa, Artificial Sequence
  Description of Artificial Sequence: Synthetic polypeptide
EVQLVESGGGLVQPGGSLTLSCAASGFAFGNHWMYWYRQAPGRGRELVASISSGGSTNYVDSVKGRFTISRDNAKNTLYLQMNSLRAEDTAVYYCGTSDNWGQGTLVTVSS

SEQ ID NO: 966 - protein, 119 aa, Artificial Sequence
  Description of Artificial Sequence: Synthetic polypeptide
EVQLLESGGGLVQPGGSLTLSCAASGFIFRAASMDWYRQFPGNERESIATISSGGFTNYADSVKGRFTISRDNSKNTLYLQMNSLRAEDTAVYYCGATFLRSDGHHTINGQGTLVTVSS

SEQ ID NO: 967 - protein, 119 aa, Artificial Sequence; identical to SEQ ID NO: 848
  Description of Artificial Sequence: Synthetic polypeptide

SEQ ID NO: 968 - protein, 382 aa, Artificial Sequence
  Description of Artificial Sequence: Synthetic polypeptide
VVGGGGTQTVVTQEPSLTVSPGGTVTLTCASSTGAVTSGNYPNWVQQKPGQAPRGLIGGTKFLVPGTPARFSGSLLGGKAALTLSGVQPEDEAEYYCTLWYSNRWVFGGGTKLTVLGGGGSGGGGSGGGGSEVQLVESGGGLVQPGGSLKLSCAASGFTFNKYAINWVRQAPGKGLEWVARIRSKYNNYATYYADQVKDRFTISRDDSKNTAYLQMNNLKTEDTAVYYCVRHANFGNSYISYWAYWGQGTLVTVSSGGGGSGGGSEVQLVESGGGLVQPGGSLTLSCAASGFAFGNHWMYWYRQAPGRGRELVASISSGGSTNYVDSVKGRFTISRDNAKNTLYLQMNSLRAEDTAVYYCGTSDNWGQGTLVTVSSHHHHHH

SEQ ID NO: 969 - protein, 390 aa, Artificial Sequence
  Description of Artificial Sequence: Synthetic polypeptide
VVGGGGTQTVVTQEPSLTVSPGGTVTLTCASSTGAVTSGNYPNWVQQKPGQAPRGLIGGTKFLVPGTPARFSGSLLGGKAALTLSGVQPEDEAEYYCTLWYSNRWVFGGGTKLTVLGGGGSGGGGSGGGGSEVQLVESGGGLVQPGGSLKLSCAASGFTFNKYAINWVRQAPGKGLEWVARIRSKYNNYATYYADQVKDRFTISRDDSKNTAYLQMNNLKTEDTAVYYCVRHANFGNSYISYWAYWGQGTLVTVSSGGGGSGGGSEVQLLESGGGLVQPGGSLTLSCAASGFIFRAASMDWYRQFPGNERESIATISSGGFTNYADSVKGRFTISRDNSKNTLYLQMNSLRAEDTAVYYCGATFLRSDGHHTINGQGTLVTVSSHHHHHH

SEQ ID NO: 970 - protein, 390 aa, Artificial Sequence
  Description of Artificial Sequence: Synthetic polypeptide
VVGGGGTQTVVTQEPSLTVSPGGTVTLTCASSTGAVTSGNYPNWVQQKPGQAPRGLIGGTKFLVPGTPARFSGSLLGGKAALTLSGVQPEDEAEYYCTLWYSNRWVFGGGTKLTVLGGGGSGGGGSGGGGSEVQLVESGGGLVQPGGSLKLSCAASGFTFNKYAINWVRQAPGKGLEWVARIRSKYNNYATYYADQVKDRFTISRDDSKNTAYLQMNNLKTEDTAVYYCVRHANFGNSYISYWAYWGQGTLVTVSSGGGGSGGGSEVQLLESGGGLVQPGGSLTLSCAASGFIFRAASMAWYRQSPGNERELVASISSGAFTNYADSVKARFTISRDNSKNTLYLQMNSLRAEDTAVYYCGATFLRSDGHHTINGQGTLVTVSSHHHHHH

SEQ ID NO: 971 - protein, 24 aa, Artificial Sequence
  Description of Artificial Sequence: Synthetic peptide
IYIWAPLAGTCGVLLLSLVITLYC

SEQ ID NO: 972 - protein, 22 aa, Artificial Sequence
  Description of Artificial Sequence: Synthetic peptide
GLLVAGVLVLLVSLGVAIHLCC

SEQ ID NO: 973 - protein, 25 aa, Artificial Sequence
  Description of Artificial Sequence: Synthetic peptide
ALIVLGGVAGLLLFIGLGIFFCVRC

SEQ ID NO: 974 - protein, 23 aa, Artificial Sequence
  Description of Artificial Sequence: Synthetic peptide
LCYLLDGILFIYGVILTALFLRV

SEQ ID NO: 975 - protein, 26 aa, Artificial Sequence
  Description of Artificial Sequence: Synthetic peptide
WVLVVVGGVLACYSLLVTVAFIIFWV

SEQ ID NO: 976 - protein, 25 aa, Artificial Sequence
  Description of Artificial Sequence: Synthetic peptide
AAILGLGLVLGLLGPLAILLALYLL

SEQ ID NO: 977 - protein, 24 aa, Artificial Sequence
  Description of Artificial Sequence: Synthetic peptide
ALPAALAVISFLLGLGLGVACVLA

SEQ ID NO: 978 - protein, 15 aa, Artificial Sequence
  Description of Artificial Sequence: Synthetic peptide
CPEPKSCDTPPPCPR

SEQ ID NO: 979 - protein, 12 aa, Artificial Sequence
  Description of Artificial Sequence: Synthetic peptide
ELKTPLGDTTHT

SEQ ID NO: 980 - protein, 10 aa, Artificial Sequence
  Description of Artificial Sequence: Synthetic peptide
KSCDKTHTCP

SEQ ID NO: 981 - protein, 7 aa, Artificial Sequence
  Description of Artificial Sequence: Synthetic peptide
KCCVDCP

SEQ ID NO: 982 - protein, 7 aa, Artificial Sequence
  Description of Artificial Sequence: Synthetic peptide
KYGPPCP

SEQ ID NO: 983 - protein, 15 aa, Artificial Sequence
  Description of Artificial Sequence: Synthetic peptide
EPKSCDKTHTCPPCP

SEQ ID NO: 984 - protein, 12 aa, Artificial Sequence
  Description of Artificial Sequence: Synthetic peptide
ERKCCVECPPCP

SEQ ID NO: 985 - protein, 17 aa, Artificial Sequence
  Description of Artificial Sequence: Synthetic peptide
ELKTPLGDTTHTCPRCP

SEQ ID NO: 986 - protein, 12 aa, Artificial Sequence
  Description of Artificial Sequence: Synthetic peptide
SPNMVPHAHHAQ

SEQ ID NO: 987 - protein, 45 aa, Artificial Sequence; identical to SEQ ID NO: 871
  Description of Artificial Sequence: Synthetic polypeptide

SEQ ID NO: 988 - protein, 10 aa, Artificial Sequence
  Description of Artificial Sequence: Synthetic peptide
PQGSTARSAG

SEQ ID NO: 989 - protein, 12 aa, Artificial Sequence
  Description of Artificial Sequence: Synthetic peptide
QDGNEEMGGITQ

SEQ ID NO: 990 - protein, 6 aa, Homo sapiens
LVQPGN

SEQ ID NO: 991 - protein, 6 aa, Homo sapiens
SLRPED

SEQ ID NO: 992 - protein, 507 aa, Artificial Sequence
  Description of Artificial Sequence: Synthetic polypeptide
EVQLVESGGGLVQPGNSLRLSCAASGFTFSKFGMSWVRQAPGKGLEWVSSISGSGRDTLYADSVKGRFTISRDNAKTTLYLQMNSLRPEDTAVYYCTIGGSLSVSSQGTLVTVSSGGGGSGGGSQTVVTQEPSLTVSPGGTVTLTCASSTGAVTSGNYPNWVQQKPGQAPRGLIGGTKFLVPGTPARFSGSLLGGKAALTLSGVQPEDEAEYYCTLWYSNRWVFGGGTKLTVLGGGGSGGGGSGGGGSEVQLVESGGGLVQPGGSLKLSCAASGFTFNKYAINWVRQAPGKGLEWVARIRSKYNNYATYYADQVKDRFTISRDDSKNTAYLQMNNLKTEDTAVYYCVRHANFGNSYISYWAYWGQGTLVTVSSGGGGSGGGSEVQLLESGGGLVQPGGSLTLSCAASGFIFRAASMAWYRQSPGNERELVASISSGAFTNYADSVKARFTISRDNSKNTLYLQMNSLRAEDTAVYYCGATFLRSDGHHTINGQGTLVTVSSHHHHHH

SEQ ID NO: 993 - protein, 383 aa, Artificial Sequence
  Description of Artificial Sequence: Synthetic polypeptide
QTVVTQEPSLTVSPGGTVTLTCASSTGAVTSGNYPNWVQQKPGQAPRGLIGGTKFLVPGTPARFSGSLLGGKAALTLSGVQPEDEAEYYCTLWYSNRWVFGGGTKLTVLGGGGSGGGGSGGGGSEVQLVESGGGLVQPGGSLKLSCAASGFTFNKYAINWVRQAPGKGLEWVARIRSKYNNYATYYADQVKDRFTISRDDSKNTAYLQMNNLKTEDTAVYYCVRHANFGNSYISYWAYWGQGTLVTVSSGGGGSGGGSEVQLLESGGGLVQPGGSLTLSCAASGFIFRAASMAWYRQSPGNERELVASISSGAFTNYADSVKARFTISRDNSKNTLYLQMNSLRAEDTAVYYCGATFLRSDGHHTINGQGTLVTVSSHHHHHH

SEQ ID NO: 994 - protein, 526 aa, Artificial Sequence
  Description of Artificial Sequence: Synthetic polypeptide
EVQLVESGGGLVQPGNSLRLSCAASGFTFSKFGMSWVRQGGGGGLDGNEEPGGLEWVSSISGSGRDTLYADSVKGRFTISRDNAKTTLYLQMNSLRPEDTAVYYCTIGGSLSVSSQGTLVTVSSGGGGSGGGGSGGVVGGGGTQTVVTQEPSLTVSPGGTVTLTCASSTGAVTSGNYPNWVQQKPGQAPRGLIGGTKFLVPGTPARFSGSLLGGKAALTLSGVQPEDEAEYYCTLWYSNRWVFGGGTKLTVLGGGGSGGGGSGGGGSEVQLVESGGGLVQPGGSLKLSCAASGFTFNKYAINWVRQAPGKGLEWVARIRSKYNNYATYYADQVKDRFTISRDDSKNTAYLQMNNLKTEDTAVYYCVRHANFGNSYISYWAYWGQGTLVTVSSGGGGSGGGSEVQLLESGGGLVQPGGSLTLSCAASGFIFRAASMAWYRQSPGNERELVASISSGAFTNYADSVKARFTISRDNSKNTLYLQMNSLRAEDTAVYYCGATFLRSDGHHTINGQGTLVTVSSHHHHHH

SEQ ID NO: 995 - protein, 114 aa, Artificial Sequence
  Description of Artificial Sequence: Synthetic polypeptide
QVQLQESGGGLVQAGGSLRLSCAASGSVSMFNSMGWHRQPPGKQRELVAIITSGGSSNYADTVKGRFTISRDNTKNTVYLQMNDLKPEDTAVYYCFYYFQSSYWGQGTQVTVSS

SEQ ID NO: 996 - protein, 119 aa, Artificial Sequence
  Description of Artificial Sequence: Synthetic polypeptide
EVQLVESGGGLVQPGGSLTLSCVASGKTSSINAMGWYRRAPGKQRELVAGISSDGSKVYADSVKGRFTISRDNAKNSVYLQMNSLRAEDTAVYYCYYFRTVSGVSMRYWGQGTLVTVSS

SEQ ID NO: 997 - protein, 119 aa, Artificial Sequence
  Description of Artificial Sequence: Synthetic polypeptide
EVQLVESGGGLVQPGGSLTLSCVASGSTSSINAVGWYRRAPGKQRELVAGISSDGSKVYRDSVKGRFTISRDNAKNSVYLQMNSLRAEDTAVYYCYYFRTVQGSSMRYWGQGTLVTVSS

SEQ ID NO: 998 - protein, 119 aa, Artificial Sequence
  Description of Artificial Sequence: Synthetic polypeptide
EVQLVESGGGLVQPGGSLTLSCVASGSTSSINAMGWYRRAPGKQRELVAGVSSDGSKVYADSVKGRFTISRDNAKNSVYLQMNSLRAEDTAVYYCYYFRTVSGSSARYWGQGTLVTVSS

SEQ ID NO: 999 - protein, 119 aa, Artificial Sequence
  Description of Artificial Sequence: Synthetic polypeptide
EVQLVESGGGLVQPGGSLTLSCVASGSTSSINAMGWYRRAPGKQRELPAGISRDGSKVYADSVKGRFTISRDNAKNSVYLQMNSLRAEDTAVYYCYYFRYVSGSSMRYWGQGTLVTVSS

SEQ ID NO: 1000 - protein, 119 aa, Artificial Sequence
  Description of Artificial Sequence: Synthetic polypeptide
EVQLVESGGGLVQPGGSLTLSCVASGSTSSINAMGWYRRAPGKQRELAAGISSDGSKLYADSVKGRFTISRDNAKNSVYLQMNSLRAEDTAVYYCYYFRTVSGSSMRYWGQGTLVTVSS

SEQ ID NO: 1001 - protein, 119 aa, Artificial Sequence
  Description of Artificial Sequence: Synthetic polypeptide
EVQLVESGGGLVQPGGSLTLSCVASGSTSRINAMGWYRRAPGKQRELVAGISSDGSKVYADSVKGRFTISRDNAKNSVYLQMNSLRAEDTAVYYCYYFRRVSGSSMRYWGQGTLVTVSS

SEQ ID NO: 1002 - protein, 119 aa, Artificial Sequence
  Description of Artificial Sequence: Synthetic polypeptide
EVQLVESGGGLVQPGGSLTLSCVASGSTSSINAMAWYRRAPGKQRELAAGISSDGSKVYADSVKGRFTISRDNAKNSVYLQMNSLRAEDTAVYYCYYFHTVSGSSMRYWGQGTLVTVSS

SEQ ID NO: 1003 - protein, 119 aa, Artificial Sequence
  Description of Artificial Sequence: Synthetic polypeptide
EVQLVESGGGLVQPGGSLTLSCVASGSTSSINAMAWYRRAPGKQRELVAGISSDGSKVYADSVKGRFTISRDNAKNSVYLQMNSLRAEDTAVYYCYYFRQVSGSSMRYWGQGTLVTVSS

SEQ ID NO: 1004 - protein, 119 aa, Artificial Sequence
  Description of Artificial Sequence: Synthetic polypeptide
EVQLVESGGGLVQPGGSLTLSCVASGSTSSINAMGWYRRAPGKQRELVAGISSDTSKVYADSVKGRFTISRDNAKNSVYLQMNSLRAEDTAVYYCYYFRTVSGSYMRYWGQGTLVTVSS

SEQ ID NO: 1005 - protein, 119 aa, Artificial Sequence
  Description of Artificial Sequence: Synthetic polypeptide
EVQLVESGGGLVQPGGSLTLSCVASGSTSTINAMGWYRRAPGKQRELVAGISSDGSKVYADSVKGRFTISRDNAKNSVYLQMNSLRAEDTAVYYCYYFRTASGSSMRYWGQGTLVTVSS

SEQ ID NO: 1006 - protein, 393 aa, Artificial Sequence
  Description of Artificial Sequence: Synthetic polypeptide
VVGGGGTQTVVTQEPSLTVSPGGTVTLTCASSTGAVTSGNYPNWVQQKPGQAPRGLIGGTKFLVPGTPARFSGSLLGGKAALTLSGVQPEDEAEYYCTLWYSNRWVFGGGTKLTVLGGGGSGGGGSGGGGSEVQLVESGGGLVQPGGSLKLSCAASGFTFNKYAINWVRQAPGKGLEWVARIRSKYNNYATYYADQVKDRFTISRDDSKNTAYLQMNNLKTEDTAVYYCVRHANFGNSYISYWAYWGQGTLVTVSSGGGGSGGGSQVQLQESGGGLVQPGGSLRLSCAASGRINSINTMGWYRQAPGNQRELVAEITRGGTTNYADSVQGRYAISRDNAKNLVYLQMNSLKPEDTDVYYCNAQTFPTFSRPTGLDYWGQGTQVTVSSHHHHHH

SEQ ID NO: 1007 - protein, 6 aa, Homo sapiens
LVQPGN

SEQ ID NO: 1008 - protein, 6 aa, Homo sapiens
DSVKGR

SEQ ID NO: 1009 - protein, 6 aa, Homo sapiens
SLRPED

SEQ ID NO: 1010 - protein, 15 aa, Artificial Sequence
  Description of Artificial Sequence: Synthetic peptide
EPKSCDKTYTCPPCP

SEQ ID NO: 1011 - protein, 6 aa, Homo sapiens
DSVKGR

SEQ ID NO: 1012 - protein, 5 aa, Homo sapiens
QDGNE

SEQ ID NO: 1013 - protein, 4 aa, Homo sapiens
DGNE

SEQ ID NO: 1014 - protein, 5 aa, Homo sapiens
DGNEE

SEQ ID NO: 1015 - protein, 5 aa, Artificial Sequence
  Description of Artificial Sequence: Synthetic peptide
GSGGS

SEQ ID NO: 1016 - protein, 4 aa, Artificial Sequence
  Description of Artificial Sequence: Synthetic peptide
GGGS

SEQ ID NO: 1017 - protein, 4 aa, Artificial Sequence
  Description of Artificial Sequence: Synthetic peptide
GGSG

SEQ ID NO: 1018 - protein, 5 aa, Artificial Sequence
  Description of Artificial Sequence: Synthetic peptide
GGSGG

SEQ ID NO: 1019 - protein, 5 aa, Artificial Sequence
  Description of Artificial Sequence: Synthetic peptide
GSGSG

SEQ ID NO: 1020 - protein, 5 aa, Artificial Sequence
  Description of Artificial Sequence: Synthetic peptide
GSGGG

SEQ ID NO: 1021 - protein, 5 aa, Artificial Sequence
  Description of Artificial Sequence: Synthetic peptide
GGGSG

SEQ ID NO: 1022 - protein, 5 aa, Artificial Sequence
  Description of Artificial Sequence: Synthetic peptide
GSSSG

SEQ ID NO: 1023 - protein, 5 aa, Artificial Sequence
  Description of Artificial Sequence: Synthetic peptide
DKTHT

SEQ ID NO: 1024 - protein, 4 aa, Artificial Sequence
  Description of Artificial Sequence: Synthetic peptide
CPPC

SEQ ID NO: 1025 - protein, 18 aa, Artificial Sequence
  Description of Artificial Sequence: Synthetic peptide
  MOD_RES (5)..(14): Any amino acid
GGGGXXXXXXXXXXGGGG

SEQ ID NO: 1026 - protein, 6 aa, Artificial Sequence
  Description of Artificial Sequence: Synthetic peptide
LVQPGN

SEQ ID NO: 1027 - protein, 5 aa, Artificial Sequence
  Description of Artificial Sequence: Synthetic peptide
APGKG

SEQ ID NO: 1028 - protein, 6 aa, Artificial Sequence
  Description of Artificial Sequence: Synthetic peptide
DSVKGR

SEQ ID NO: 1029 - protein, 6 aa, Artificial Sequence
  Description of Artificial Sequence: Synthetic peptide
SLRPED

SEQ ID NO: 1030 - protein, 8 aa, Artificial Sequence
  Description of Artificial Sequence: Synthetic peptide
  MOD_RES (4)..(4): Any amino acid
CFCXLCFR

SEQ ID NO: 1031 - protein, 5 aa, Artificial Sequence
  Description of Artificial Sequence: Synthetic peptide
STQDM

SEQ ID NO: 1032 - protein, 6 aa, Artificial Sequence
  Description of Artificial Sequence: Synthetic peptide
DSVKGR

SEQ ID NO: 1033 - protein, 6 aa, Artificial Sequence
  Description of Artificial Sequence: Synthetic peptide
SLRPED

SEQ ID NO: 1034 - protein, 6 aa, Artificial Sequence
  Description of Artificial Sequence: Synthetic peptide
LVQPGN

SEQ ID NO: 1035 - protein, 5 aa, Artificial Sequence
  Description of Artificial Sequence: Synthetic peptide
KQHSN

SEQ ID NO: 1036 - protein, 6 aa, Artificial Sequence
  Description of Artificial Sequence: Synthetic peptide
DSVKGR

SEQ ID NO: 1037 - protein, 6 aa, Artificial Sequence
  Description of Artificial Sequence: Synthetic peptide
SLRPED

SEQ ID NO: 1038 - protein, 6 aa, Artificial Sequence
  Description of Artificial Sequence: Synthetic peptide
IVLYEW

SEQ ID NO: 1039 - protein, 4 aa, Artificial Sequence
  Description of Artificial Sequence: Synthetic peptide
APLV

SEQ ID NO: 1040 - protein, 6 aa, Artificial Sequence
  Description of Artificial Sequence: Synthetic peptide
SSMIQM

SEQ ID NO: 1041 - protein, 6 aa, Artificial Sequence
  Description of Artificial Sequence: Synthetic peptide
SLRPED

SEQ ID NO: 1042 - protein, 6 aa, Artificial Sequence
  Description of Artificial Sequence: Synthetic peptide
CFMCYW

SEQ ID NO: 1043 - protein, 8 aa, Artificial Sequence
  Description of Artificial Sequence: Synthetic peptide
DMWGANCS

SEQ ID NO: 1044 - protein, 6 aa, Artificial Sequence
  Description of Artificial Sequence: Synthetic peptide
DSVKGR

SEQ ID NO: 1045 - protein, 6 aa, Artificial Sequence
  Description of Artificial Sequence: Synthetic peptide
SLRPED

SEQ ID NO: 1046 - protein, 7 aa, Artificial Sequence
  Description of Artificial Sequence: Synthetic peptide
FYLAWAA

SEQ ID NO: 1047 - protein, 8 aa, Artificial Sequence
  Description of Artificial Sequence: Synthetic peptide
INVGSPAY

SEQ ID NO: 1048 - protein, 6 aa, Artificial Sequence
  Description of Artificial Sequence: Synthetic peptide
DSVKGR

SEQ ID NO: 1049 - protein, 6 aa, Artificial Sequence
  Description of Artificial Sequence: Synthetic peptide
SLHPED

SEQ ID NO: 1050 - protein, 8 aa, Artificial Sequence
  Description of Artificial Sequence: Synthetic peptide
GLSNRSGC

SEQ ID NO: 1051 - protein, 8 aa, Artificial Sequence
  Description of Artificial Sequence: Synthetic peptide
CSVGISRQ

SEQ ID NO: 1052 - protein, 7 aa, Artificial Sequence
  Description of Artificial Sequence: Synthetic peptide
LLLIFKF

SEQ ID NO: 1053 - protein, 4 aa, Artificial Sequence
  Description of Artificial Sequence: Synthetic peptide
LMRI

SEQ ID NO: 1054 - protein, 7 aa, Artificial Sequence
  Description of Artificial Sequence: Synthetic peptide
FFNSEQF

SEQ ID NO: 1055 - protein, 5 aa, Artificial Sequence
  Description of Artificial Sequence: Synthetic peptide
APGKG

SEQ ID NO: 1056 - protein, 9 aa, Artificial Sequence
  Description of Artificial Sequence: Synthetic peptide
FLILALTKP

SEQ ID NO: 1057 - protein, 4 aa, Artificial Sequence
  Description of Artificial Sequence: Synthetic peptide
QLMI

SEQ ID NO: 1058 - protein, 6 aa, Artificial Sequence
  Description of Artificial Sequence: Synthetic peptide
LVQPGN

SEQ ID NO: 1059 - protein, 8 aa, Artificial Sequence
  Description of Artificial Sequence: Synthetic peptide
LRGGLHRV

SEQ ID NO: 1060 - protein, 6 aa, Artificial Sequence
  Description of Artificial Sequence: Synthetic peptide
SKWACG

SEQ ID NO: 1061 - protein, 8 aa, Artificial Sequence
  Description of Artificial Sequence: Synthetic peptide
VYMFNLVD

SEQ ID NO: 1062 - protein, 6 aa, Artificial Sequence
  Description of Artificial Sequence: Synthetic peptide
QLETPC

SEQ ID NO: 1063 - protein, 7 aa, Artificial Sequence
  Description of Artificial Sequence: Synthetic peptide
NYRWISL

SEQ ID NO: 1064 - protein, 6 aa, Artificial Sequence
  Description of Artificial Sequence: Synthetic peptide
SLRPED

SEQ ID NO: 1065 - protein, 6 aa, Artificial Sequence
  Description of Artificial Sequence: Synthetic peptide
LVQPGN

SEQ ID NO: 1066 - protein, 5 aa, Artificial Sequence
  Description of Artificial Sequence: Synthetic peptide
APGKG

SEQ ID NO: 1067 - protein, 9 aa, Artificial Sequence
  Description of Artificial Sequence: Synthetic peptide
SVLFGVAYL

SEQ ID NO: 1068 - protein, 6 aa, Artificial Sequence
  Description of Artificial Sequence: Synthetic peptide
SLRPED

SEQ ID NO: 1069 - protein, 8 aa, Artificial Sequence
  Description of Artificial Sequence: Synthetic peptide
FGPYNLVS

SEQ ID NO: 1070 - protein, 7 aa, Artificial Sequence
  Description of Artificial Sequence: Synthetic peptide
KLSTIWM

SEQ ID NO: 1071 - protein, 8 aa, Artificial Sequence
  Description of Artificial Sequence: Synthetic peptide
MRRPCVIS

SEQ ID NO: 1072 - protein, 7 aa, Artificial Sequence
  Description of Artificial Sequence: Synthetic peptide
VPSYRVA

SEQ ID NO: 1073 - protein, 7 aa, Artificial Sequence
  Description of Artificial Sequence: Synthetic peptide
DSGLTLR

SEQ ID NO: 1074 - protein, 6 aa, Artificial Sequence
  Description of Artificial Sequence: Synthetic peptide
LLWHWD

SEQ ID NO: 1075 - protein, 8 aa, Artificial Sequence
  Description of Artificial Sequence: Synthetic peptide
VTEMNAMS

SEQ ID NO: 1076 - protein, 7 aa, Artificial Sequence
  Description of Artificial Sequence: Synthetic peptide
  MOD_RES (2)..(2): Any amino acid
GXTDGGT

SEQ ID NO: 1077 - protein, 5 aa, Artificial Sequence
  Description of Artificial Sequence: Synthetic peptide
  MOD_RES (4)..(4): Any amino acid
FLIXF

SEQ ID NO: 1078 - protein, 6 aa, Artificial Sequence
  Description of Artificial Sequence: Synthetic peptide
DSVKGR

SEQ ID NO: 1079 - protein, 6 aa, Artificial Sequence
  Description of Artificial Sequence: Synthetic peptide
LKRTVY

SEQ ID NO: 1080 - protein, 8 aa, Artificial Sequence
  Description of Artificial Sequence: Synthetic peptide
SICIVSFY

SEQ ID NO: 1081 - protein, 5 aa, Artificial Sequence
  Description of Artificial Sequence: Synthetic peptide
TNTAS

SEQ ID NO: 1082 - protein, 9 aa, Artificial Sequence
  Description of Artificial Sequence: Synthetic peptide
RGLIDNDYQ

SEQ ID NO: 1083 - protein, 5 aa, Artificial Sequence
  Description of Artificial Sequence: Synthetic peptide
RQYSV

SEQ ID NO: 1084 - protein, 6 aa, Artificial Sequence
  Description of Artificial Sequence: Synthetic peptide
  MOD_RES (5)..(6): Any amino acid
LSRPXX

SEQ ID NO: 1085 - protein, 7 aa, Artificial Sequence
  Description of Artificial Sequence: Synthetic peptide
CPPAIMP

SEQ ID NO: 1086 - protein, 6 aa, Artificial Sequence
  Description of Artificial Sequence: Synthetic peptide
DSVKGL

SEQ ID NO: 1087 - protein, 6 aa, Artificial Sequence
  Description of Artificial Sequence: Synthetic peptide
SLRPED

SEQ ID NO: 1088 - protein, 8 aa, Artificial Sequence
  Description of Artificial Sequence: Synthetic peptide
  MOD_RES (7)..(7): Any amino acid
FALQCPXL

SEQ ID NO: 1089 - protein, 4 aa, Artificial Sequence
  Description of Artificial Sequence: Synthetic peptide
IVGN

SEQ ID NO: 1090 - protein, 7 aa, Artificial Sequence
  Description of Artificial Sequence: Synthetic peptide
LINLITE

SEQ ID NO: 1091 - protein, 6 aa, Artificial Sequence
  Description of Artificial Sequence: Synthetic peptide
SLCPED

SEQ ID NO: 1092 - protein, 6 aa, Artificial Sequence
  Description of Artificial Sequence: Synthetic peptide
MSMSLF

SEQ ID NO: 1093 - protein, 4 aa, Artificial Sequence
  Description of Artificial Sequence: Synthetic peptide
NVTL

SEQ ID NO: 1094 - protein, 6 aa, Artificial Sequence
  Description of Artificial Sequence: Synthetic peptide
SDNILY

SEQ ID NO: 1095 - protein, 6 aa, Artificial Sequence
  Description of Artificial Sequence: Synthetic peptide
SLRPED

SEQ ID NO: 1096 - protein, 6 aa, Artificial Sequence
  Description of Artificial Sequence: Synthetic peptide
IDVFIC

SEQ ID NO: 1097 - protein, 7 aa, Artificial Sequence
  Description of Artificial Sequence: Synthetic peptide
ISLPVMS

SEQ ID NO: 1098 - protein, 8 aa, Artificial Sequence
  Description of Artificial Sequence: Synthetic peptide
TPRTPTRP

SEQ ID NO: 1099 - protein, 6 aa, Artificial Sequence
  Description of Artificial Sequence: Synthetic peptide
SLRPED

SEQ ID NO: 1100 - protein, 6 aa, Artificial Sequence
  Description of Artificial Sequence: Synthetic peptide
LFQPGN

SEQ ID NO: 1101 - protein, 7 aa, Artificial Sequence
  Description of Artificial Sequence: Synthetic peptide
LYEPRAE

SEQ ID NO: 1102 - protein, 7 aa, Artificial Sequence
  Description of Artificial Sequence: Synthetic peptide
FLCFDLQ

SEQ ID NO: 1103 - protein, 5 aa, Artificial Sequence
  Description of Artificial Sequence: Synthetic peptide
RISAM

SEQ ID NO: 1104 - protein, 8 aa, Artificial Sequence
  Description of Artificial Sequence: Synthetic peptide
  MOD_RES (8)..(8): Any amino acid
YGNNCVLX

SEQ ID NO: 1105 - protein, 6 aa, Artificial Sequence
  Description of Artificial Sequence: Synthetic peptide
VARAYD

SEQ ID NO: 1106 - protein, 7 aa, Artificial Sequence
  Description of Artificial Sequence: Synthetic peptide
YRNHNRN

SEQ ID NO: 1107 - protein, 6 aa, Artificial Sequence
  Description of Artificial Sequence: Synthetic peptide
LVQPGN

SEQ ID NO: 1108 - protein, 5 aa, Artificial Sequence
  Description of Artificial Sequence: Synthetic peptide
APGKG

SEQ ID NO: 1109 - protein, 5 aa, Artificial Sequence
  Description of Artificial Sequence: Synthetic peptide
VACGR

SEQ ID NO: 1110 - protein, 5 aa, Artificial Sequence
  Description of Artificial Sequence: Synthetic peptide
NTTAR

SEQ ID NO: 1111 - protein, 8 aa, Artificial Sequence
  Description of Artificial Sequence: Synthetic peptide
MLTGFPFG

SEQ ID NO: 1112 - protein, 4 aa, Artificial Sequence
  Description of Artificial Sequence: Synthetic peptide
EIWW

SEQ ID NO: 1113 - protein, 6 aa, Artificial Sequence
  Description of Artificial Sequence: Synthetic peptide
DSVKGR

SEQ ID NO: 1114 - protein, 6 aa, Artificial Sequence
  Description of Artificial Sequence: Synthetic peptide
SLRPED

SEQ ID NO: 1115 - protein, 6 aa, Artificial Sequence
  Description of Artificial Sequence: Synthetic peptide
LVQPGN

SEQ ID NO: 1116 - protein, 5 aa, Artificial Sequence
  Description of Artificial Sequence: Synthetic peptide
YKEWD

SEQ ID NO: 1117 - protein, 6 aa, Artificial Sequence
  Description of Artificial Sequence: Synthetic peptide
DSVKGR

SEQ ID NO: 1118 - protein, 6 aa, Artificial Sequence
  Description of Artificial Sequence: Synthetic peptide
SLRPED

SEQ ID NO: 1119 - protein, 6 aa, Artificial Sequence
  Description of Artificial Sequence: Synthetic peptide
LVQPGN

SEQ ID NO: 1120 - protein, 5 aa, Artificial Sequence
  Description of Artificial Sequence: Synthetic peptide
APGKG

SEQ ID NO: 1121 - protein, 6 aa, Artificial Sequence
  Description of Artificial Sequence: Synthetic peptide
DSDKGR

SEQ ID NO: 1122 - protein, 6 aa, Artificial Sequence
  Description of Artificial Sequence: Synthetic peptide
SLPPQD

SEQ ID NO: 1123 - protein, 6 aa, Artificial Sequence
  Description of Artificial Sequence: Synthetic peptide
LVQPGN

SEQ ID NO: 1124 - protein, 6 aa, Artificial Sequence
  Description of Artificial Sequence: Synthetic peptide
DSVKGR

SEQ ID NO: 1125 - protein, 6 aa, Artificial Sequence
  Description of Artificial Sequence: Synthetic peptide
SLRPED

SEQ ID NO: 1126 - protein, 7 aa, Artificial Sequence
  Description of Artificial Sequence: Synthetic peptide
GLINSIA

SEQ ID NO: 1127 - protein, 6 aa, Artificial Sequence
  Description of Artificial Sequence: Synthetic peptide
RGSEGG

SEQ ID NO: 1128 - protein, 6 aa, Artificial Sequence
  Description of Artificial Sequence: Synthetic peptide
DSVKGR

SEQ ID NO: 1129 - protein, 6 aa, Artificial Sequence
  Description of Artificial Sequence: Synthetic peptide
SLRPED

SEQ ID NO: 1130 - protein, 6 aa, Artificial Sequence
  Description of Artificial Sequence: Synthetic peptide
LVQPGN

SEQ ID NO: 1131 - protein, 5 aa, Artificial Sequence
  Description of Artificial Sequence: Synthetic peptide
APGKG

SEQ ID NO: 1132 - protein, 6 aa, Artificial Sequence
  Description of Artificial Sequence: Synthetic peptide
DSVKGR

SEQ ID NO: 1133 - protein, 6 aa, Artificial Sequence
  Description of Artificial Sequence: Synthetic peptide
SLRPED

SEQ ID NO: 1134 - protein, 6 aa, Artificial Sequence
  Description of Artificial Sequence: Synthetic peptide
LIQPGN

SEQ ID NO: 1135 - protein, 6 aa, Artificial Sequence
  Description of Artificial Sequence: Synthetic peptide
  MOD_RES (1)..(1): Any amino acid
XLHGGS

SEQ ID NO: 1136 - protein, 6 aa, Artificial Sequence
  Description of Artificial Sequence: Synthetic peptide
DSVKGR

SEQ ID NO: 1137 - protein, 6 aa, Artificial Sequence
  Description of Artificial Sequence: Synthetic peptide
SLRPED

SEQ ID NO: 1138 - protein, 6 aa, Artificial Sequence
  Description of Artificial Sequence: Synthetic peptide
LVQPGN

SEQ ID NO: 1139 - protein, 5 aa, Artificial Sequence
  Description of Artificial Sequence: Synthetic peptide
LTNTS

SEQ ID NO: 1140 - protein, 6 aa, Artificial Sequence
  Description of Artificial Sequence: Synthetic peptide
SLRPED

SEQ ID NO: 1141 - protein, 6 aa, Artificial Sequence
  Description of Artificial Sequence: Synthetic peptide
LVQPGN

SEQ ID NO: 1142 - protein, 5 aa, Artificial Sequence
  Description of Artificial Sequence: Synthetic peptide
APGKG

SEQ ID NO: 1143 - protein, 7 aa, Artificial Sequence
  Description of Artificial Sequence: Synthetic peptide
GAYFTGR

SEQ ID NO: 1144 - protein, 6 aa, Artificial Sequence
  Description of Artificial Sequence: Synthetic peptide
SLRPED

SEQ ID NO: 1145 - protein, 6 aa, Artificial Sequence
  Description of Artificial Sequence: Synthetic peptide
LVQPGN

SEQ ID NO: 1146 - protein, 7 aa, Artificial Sequence
  Description of Artificial Sequence: Synthetic peptide
KQQSHIM

SEQ ID NO: 1147 - protein, 6 aa, Artificial Sequence
  Description of Artificial Sequence: Synthetic peptide
DSVKGR

SEQ ID NO: 1148 - protein, 6 aa, Artificial Sequence
  Description of Artificial Sequence: Synthetic peptide
SLRPED

SEQ ID NO: 1149 - protein, 6 aa, Artificial Sequence
  Description of Artificial Sequence: Synthetic peptide
LVQPGN

SEQ ID NO: 1150 - protein, 6 aa, Artificial Sequence
  Description of Artificial Sequence: Synthetic peptide
  MOD_RES (3)..(3): Any amino acid
LPXMKR

SEQ ID NO: 1151 - protein, 6 aa, Artificial Sequence
  Description of Artificial Sequence: Synthetic peptide
DSVKGR

SEQ ID NO: 1152 - protein, 6 aa, Artificial Sequence
  Description of Artificial Sequence: Synthetic peptide
SLRPED

SEQ ID NO: 1153 - protein, 6 aa, Artificial Sequence
  Description of Artificial Sequence: Synthetic peptide
LVQPGN

SEQ ID NO: 1154 - protein, 5 aa, Artificial Sequence
  Description of Artificial Sequence: Synthetic peptide
VGHPK

SEQ ID NO: 1155 - protein, 6 aa, Artificial Sequence
  Description of Artificial Sequence: Synthetic peptide
DSVKGR

SEQ ID NO: 1156 - protein, 6 aa, Artificial Sequence
  Description of Artificial Sequence: Synthetic peptide
SLRPED

SEQ ID NO: 1157 - protein, 6 aa, Artificial Sequence
  Description of Artificial Sequence: Synthetic peptide
LVQPGN

SEQ ID NO: 1158 - protein, 5 aa, Artificial Sequence
  Description of Artificial Sequence: Synthetic peptide
APGKG

SEQ ID NO: 1159 - protein, 6 aa, Artificial Sequence
  Description of Artificial Sequence: Synthetic peptide
DSVKGR

SEQ ID NO: 1160 - protein, 6 aa, Artificial Sequence
  Description of Artificial Sequence: Synthetic peptide
SLRPED

SEQ ID NO: 1161 - protein, 6 aa, Artificial Sequence
  Description of Artificial Sequence: Synthetic peptide
LVQPGN

SEQ ID NO: 1162 - protein, 5 aa, Artificial Sequence
  Description of Artificial Sequence: Synthetic peptide
TVTTP

SEQ ID NO: 1163 - protein, 6 aa, Artificial Sequence
  Description of Artificial Sequence: Synthetic peptide
DSVKGR

SEQ ID NO: 1164 - protein, 6 aa, Artificial Sequence
  Description of Artificial Sequence: Synthetic peptide
SLRPED

SEQ ID NO: 1165 - protein, 6 aa, Artificial Sequence
  Description of Artificial Sequence: Synthetic peptide
LVQPGN

SEQ ID NO: 1166 - protein, 6 aa, Artificial Sequence
  Description of Artificial Sequence: Synthetic peptide
SNSLNS

SEQ ID NO: 1167 - protein, 6 aa, Artificial Sequence
  Description of Artificial Sequence: Synthetic peptide
DSVKGR

SEQ ID NO: 1168 - protein, 6 aa, Artificial Sequence
  Description of Artificial Sequence: Synthetic peptide
SLRPED

SEQ ID NO: 1169 - protein, 6 aa, Artificial Sequence
  Description of Artificial Sequence: Synthetic peptide
LVQPGN

SEQ ID NO: 1170 - protein, 5 aa, Artificial Sequence
  Description of Artificial Sequence: Synthetic peptide
TSSRT

SEQ ID NO: 1171 - protein, 6 aa, Artificial Sequence
  Description of Artificial Sequence: Synthetic peptide
DSVKGR

SEQ ID NO: 1172 - protein, 7 aa, Artificial Sequence
  Description of Artificial Sequence: Synthetic peptide
FPNKAIN

SEQ ID NO: 1173 - protein, 6 aa, Artificial Sequence
  Description of Artificial Sequence: Synthetic peptide
LVQPGN

SEQ ID NO: 1174 - protein, 6 aa, Artificial Sequence
  Description of Artificial Sequence: Synthetic peptide
SNSLNS

SEQ ID NO: 1175 - protein, 6 aa, Artificial Sequence
  Description of Artificial Sequence: Synthetic peptide
DSVKGR

SEQ ID NO: 1176 - protein, 6 aa, Artificial Sequence
  Description of Artificial Sequence: Synthetic peptide
SLRPED

SEQ ID NO: 1177 - protein, 6 aa, Artificial Sequence
  Description of Artificial Sequence: Synthetic peptide
LVQPGN

SEQ ID NO: 1178 - protein, 5 aa, Artificial Sequence
  Description of Artificial Sequence: Synthetic peptide
VANLY

SEQ ID NO: 1179 - protein, 6 aa, Artificial Sequence
  Description of Artificial Sequence: Synthetic peptide
DSVKGR

SEQ ID NO: 1180 - protein, 6 aa, Artificial Sequence
  Description of Artificial Sequence: Synthetic peptide
SLRPED

SEQ ID NO: 1181 - protein, 6 aa, Artificial Sequence
  Description of Artificial Sequence: Synthetic peptide
LVQPGN

SEQ ID NO: 1182 - protein, 5 aa, Artificial Sequence
  Description of Artificial Sequence: Synthetic peptide
SEAKT

SEQ ID NO: 1183 - protein, 6 aa, Artificial Sequence
  Description of Artificial Sequence: Synthetic peptide
DSVKGR

SEQ ID NO: 1184 - protein, 6 aa, Artificial Sequence
  Description of Artificial Sequence: Synthetic peptide
SLRPED

SEQ ID NO: 1185 - protein, 6 aa, Artificial Sequence
  Description of Artificial Sequence: Synthetic peptide
LVQPGN

SEQ ID NO: 1186 - protein, 5 aa, Artificial Sequence
  Description of Artificial Sequence: Synthetic peptide
APGEG

SEQ ID NO: 1187 - protein, 6 aa, Artificial Sequence
  Description of Artificial Sequence: Synthetic peptide
DSVKGR

SEQ ID NO: 1188 - protein, 6 aa, Artificial Sequence
  Description of Artificial Sequence: Synthetic peptide
SLRPED

SEQ ID NO: 1189 - protein, 6 aa, Artificial Sequence
  Description of Artificial Sequence: Synthetic peptide
LVQPGN

SEQ ID NO: 1190 - protein, 7 aa, Artificial Sequence
  Description of Artificial Sequence: Synthetic peptide
NMIRYPK

SEQ ID NO: 1191 - protein, 6 aa, Artificial Sequence
  Description of Artificial Sequence: Synthetic peptide
DSVKGR

SEQ ID NO: 1192 - protein, 6 aa, Artificial Sequence
  Description of Artificial Sequence: Synthetic peptide
SLRPED

SEQ ID NO: 1193 - protein, 6 aa, Artificial Sequence
  Description of Artificial Sequence: Synthetic peptide
LVQPGN

SEQ ID NO: 1194 - protein, 5 aa, Artificial Sequence
  Description of Artificial Sequence: Synthetic peptide
APGKG

SEQ ID NO: 1195 - protein, 6 aa, Artificial Sequence
  Description of Artificial Sequence: Synthetic peptide
DSVKGR

SEQ ID NO: 1196 - protein, 6 aa, Artificial Sequence
  Description of Artificial Sequence: Synthetic peptide
SLRPED

SEQ ID NO: 1197 - protein, 7 aa, Artificial Sequence
  Description of Artificial Sequence: Synthetic peptide
VAVLRGE

SEQ ID NO: 1198 - protein, 5 aa, Artificial Sequence
  Description of Artificial Sequence: Synthetic peptide
RALNL

SEQ ID NO: 1199 - protein, 6 aa, Artificial Sequence
  Description of Artificial Sequence: Synthetic peptide
DSVKGR

SEQ ID NO: 1200 - protein, 6 aa, Artificial Sequence
  Description of Artificial Sequence: Synthetic peptide
SLRPED

SEQ ID NO: 1201 - protein, 7 aa, Artificial Sequence
  Description of Artificial Sequence: Synthetic peptide
AAADNGV

SEQ ID NO: 1202 - protein, 5 aa, Artificial Sequence
  Description of Artificial Sequence: Synthetic peptide
APGKG

SEQ ID NO: 1203 - protein, 6 aa, Artificial Sequence
  Description of Artificial Sequence: Synthetic peptide
DSVKGR

SEQ ID NO: 1204 - protein, 6 aa, Artificial Sequence
  Description of Artificial Sequence: Synthetic peptide
SLRPED

SEQ ID NO: 1205 - protein, 6 aa, Artificial Sequence
  Description of Artificial Sequence: Synthetic peptide
LVQPGN

SEQ ID NO: 1206 - protein, 5 aa, Artificial Sequence
  Description of Artificial Sequence: Synthetic peptide
TSRNG

SEQ ID NO: 1207 - protein, 6 aa, Artificial Sequence
  Description of Artificial Sequence: Synthetic peptide
DSVKGR

SEQ ID NO: 1208 - protein, 6 aa, Artificial Sequence
  Description of Artificial Sequence: Synthetic peptide
SLRPED

SEQ ID NO: 1209 - protein, 6 aa, Artificial Sequence
  Description of Artificial Sequence: Synthetic peptide
LVQPGN

SEQ ID NO: 1210 - protein, 5 aa, Artificial Sequence
  Description of Artificial Sequence: Synthetic peptide
TNLSY

SEQ ID NO: 1211 - protein, 6 aa, Artificial Sequence
  Description of Artificial Sequence: Synthetic peptide
DSVKGR

SEQ ID NO: 1212 - protein, 6 aa, Artificial Sequence
  Description of Artificial Sequence: Synthetic peptide
SLRPED

SEQ ID NO: 1213 - protein, 6 aa, Artificial Sequence
  Description of Artificial Sequence: Synthetic peptide
LVQPGN

SEQ ID NO: 1214 - protein, 7 aa, Artificial Sequence
  Description of Artificial Sequence: Synthetic peptide
VKKSQNS

SEQ ID NO: 1215 - protein, 6 aa, Artificial Sequence
  Description of Artificial Sequence: Synthetic peptide
DSVRGR

SEQ ID NO: 1216 - protein, 6 aa, Artificial Sequence
  Description of Artificial Sequence: Synthetic peptide
SLRPED

SEQ ID NO: 1217 - protein, 6 aa, Artificial Sequence
  Description of Artificial Sequence: Synthetic peptide
LVQPGN

SEQ ID NO: 1218 - protein, 6 aa, Artificial Sequence
  Description of Artificial Sequence: Synthetic peptide
ADDRTH

SEQ ID NO: 1219 - protein, 6 aa, Artificial Sequence
  Description of Artificial Sequence: Synthetic peptide
YSVKGR

SEQ ID NO: 1220 - protein, 6 aa, Artificial Sequence
  Description of Artificial Sequence: Synthetic peptide
SLRPED

SEQ ID NO: 1221 - protein, 6 aa, Artificial Sequence
  Description of Artificial Sequence: Synthetic peptide
LVQPGN

SEQ ID NO: 1222 - protein, 5 aa, Artificial Sequence
  Description of Artificial Sequence: Synthetic peptide
APGKG

SEQ ID NO: 1223 - protein, 6 aa, Artificial Sequence
  Description of Artificial Sequence: Synthetic peptide
DSVKGR

SEQ ID NO: 1224 - protein, 6 aa, Artificial Sequence
  Description of Artificial Sequence: Synthetic peptide
SLRPED

SEQ ID NO: 1225 - protein, 6 aa, Artificial Sequence
  Description of Artificial Sequence: Synthetic peptide
LVQPGN

SEQ ID NO: 1226 - protein, 5 aa, Artificial Sequence
  Description of Artificial Sequence: Synthetic peptide
  MOD_RES (4)..(4): Any amino acid
APNXV

SEQ ID NO: 1227 - protein, 5 aa, Artificial Sequence
  Description of Artificial Sequence: Synthetic peptide
  MOD_RES (4)..(4): Any amino acid
SADXG

SEQ ID NO: 1228 - protein, 6 aa, Artificial Sequence
  Description of Artificial Sequence: Synthetic peptide
  MOD_RES (2)..(2): Any amino acid
SXNPQD

SEQ ID NO: 1229 - protein, 6 aa, Artificial Sequence
  Description of Artificial Sequence: Synthetic peptide
  MOD_RES (6)..(6): Any amino acid
PGGEGX

SEQ ID NO: 1230 - protein, 5 aa, Artificial Sequence
  Description of Artificial Sequence: Synthetic peptide
  MOD_RES (1)..(1): Any amino acid
XSISP

SEQ ID NO: 1231 - protein, 6 aa, Artificial Sequence
  Description of Artificial Sequence: Synthetic peptide
DSVKGR

SEQ ID NO: 1232 - protein, 6 aa, Artificial Sequence
  Description of Artificial Sequence: Synthetic peptide
SLPPED

SEQ ID NO: 1233 - protein, 6 aa, Artificial Sequence
  Description of Artificial Sequence: Synthetic peptide
LVQPGN

SEQ ID NO: 1234 - protein, 5 aa, Artificial Sequence
  Description of Artificial Sequence: Synthetic peptide
APGKG

SEQ ID NO: 1235 - protein, 6 aa, Artificial Sequence
  Description of Artificial Sequence: Synthetic peptide
DSVKGR

SEQ ID NO: 1236 - protein, 6 aa, Artificial Sequence
  Description of Artificial Sequence: Synthetic peptide
SLRPED

1. A dual binding moiety comprising a non-CDR loop and a cleavable linker, wherein the dual binding moiety is capable of an interaction with a domain by specific binding or by steric occlusion,
wherein upon the interaction between the dual binding moiety and the domain, the dual binding moiety is capable of masking the domain from binding its target, and
wherein upon cleavage of the cleavable linker, the dual binding moiety is capable of unmasking the domain.

2. The dual binding moiety of claim 1, wherein the dual binding moiety is further capable of interacting with a half-life extending protein.

3. (canceled)

4. The dual binding moiety of claim 1, wherein the non-CDR loop provides a binding site specific for the domain.

5. The dual binding moiety of claim 4, wherein the non-CDR loop comprises AB, C″D, EF, and CC′ loops and wherein the binding site specific for the domain is within the AB, C″D, EF, or CC′ loop.

6. (canceled)

7. (canceled)

8. The dual binding moiety of claim 5, wherein a CD3 binding epitope is grafted into at least one of the AB, C″D, EF, and CC′ loops.

9. (canceled)

10. (canceled)

11. The dual binding moiety of claim 1, wherein the dual binding moiety comprises a natural peptide, a synthetic peptide, an engineered scaffold, or an engineered bulk serum protein.

12. The dual binding moiety of claim 11, wherein the engineered scaffold comprises at least one of: an sdAb, an scFv, an Fab, a VHH, a IgNAR, a VH, a VL, a fibronectin type III domain, an immunoglobulin-like scaffold, a bacterial albumin-binding domain, an adnectin, a monobody, an affibody, an affilin, an affimer, an affitin, an alphabody, an anticalin, an avimer, a centyrin, a DARPin, a cystine knot peptide, a lipocalin, a three-helix bundle scaffold, a protein G-related albumin-binding module, a DNA or RNA aptamer scaffold, or any combinations thereof.

13. The dual binding moiety of claim 1, wherein the non-CDR-loop is from at least one of: a variable domain of an immunoglobulin molecule, a constant domain of an immunoglobulin molecule, a C1-set domain of an immunoglobulin molecule, a C2-set domain of an immunoglobulin molecule, an I-domain of an immunoglobulin molecule, or any combinations thereof.

14. (canceled)

15. The dual binding moiety of claim 1, wherein the dual binding moiety comprises albumin.

16. The dual binding moiety of claim 1, wherein the dual binding moiety further comprises a complementarity determining region (CDR).

17. The dual binding moiety of claim 1, wherein the dual binding moiety comprises a binding site specific for a bulk serum protein.

18. The dual binding moiety of claim 17, wherein the bulk serum protein is at least one of: albumin, transferrin, IgG1, IgG2, IgG4, IgG3, IgA monomer, Factor XIII, Fibrinogen, IgE, and pentameric IgM, or any combinations thereof.

19.-21. (canceled)

22. The dual binding moiety of claim 1, wherein the dual binding moiety comprises a binding site specific for a CD3ε domain, and wherein the binding site for the CD3ε domain comprises at least one of the following motifs: QDGNE, QDGNEE, DGNE, and DGNEE.

23. The dual binding moiety of claim 1, wherein the cleavable linker comprises a cleavage site.

24. The dual binding moiety of claim 23, wherein the cleavage site is a protease cleavage site.

25. The dual binding moiety of claim 1, wherein the domain is a target antigen binding domain, and wherein the dual binding moiety is capable of masking the target antigen binding domain from binding to a target.

26. The dual binding moiety of claim 25, wherein the target comprises a tumor antigen.

27. The dual binding moiety of claim 26, wherein the tumor antigen comprises EpCAM, EGFR, HER-2, HER-3, c-Met, FoIR, PSMA, CD38, BCMA, CEA. 5T4, AFP, B7-H3, Cadherin-6, CAIX, CD117, CD123, CD138, CD166, CD19, CD20, CD205, CD22, CD30, CD33, CD40, CD352, CD37, CD44, CD52, CD56, CD70, CD71, CD74, CD79b, DLL3, EphA2, FAP, FGFR2, FGFR3, GPC3, gpA33, FLT-3, gpNMB, HPV-16 E6, HPV-16 E7, ITGA2, ITGA3, SLC39A6, MAGE, mesothelin, Muc1, Muc16, NaPi2b, Nectin-4, P-cadherin, NY-ESO-1, PRLR, PSCA, PTK7, ROR1, SLC44A4, SLTRKS, SLTRK6, STEAP1, TIM1, Trop2, or WT1.

28.-31. (canceled)

32. The dual binding moiety of claim 24, wherein the protease cleavage site is recognized by a serine protease, a cysteine protease, an aspartate protease, a threonine protease, a glutamic acid protease, a metalloproteinase, a gelatinase, or a asparagine peptide lyase.

33. The dual binding moiety of claim 24, wherein the protease cleavage site is recognized by a Cathepsin B, a Cathepsin C, a Cathepsin D, a Cathepsin E, a Cathepsin K, a Cathepsin L, a kallikrein, a hK1, a hK10, a hK15, a plasmin, a collagenase, a Type IV collagenase, a stromelysin, a Factor Xa, a chymotrypsin-like protease, a trypsin-like protease, a elastase-like protease, a subtilisin-like protease, an actinidain, a bromelain, a calpain, a caspase, a caspase-3, a Mir1-CP, a papain, a HIV-1 protease, a HSV protease, a CMV protease, a chymosin, a renin, a pepsin, a matriptase, a legumain, a plasmepsin, a nepenthesin, a metalloexopeptidase, a metalloendopeptidase, a matrix metalloprotease (MMP), a MMP1, a MMP2, a MMP3, a MMP7, a MMP8, a MMP9, a MMP10, a MMP11, a MMP12, a MMP13, a MMP14, an ADAMS, an ADAM10, an ADAM12, an urokinase plasminogen activator (uPA), an enterokinase, a prostate-specific target (PSA, hK3), an interleukin-1β converting enzyme, a thrombin, a FAP (FAP-α), a dipeptidyl peptidase, a type II transmembrane serine protease (TTSP), a neutrophil elastase, a cathepsin G, a proteinase 3, a neutrophil serine protease 4, a mast cell chymase, or a mast cell tryptase.

34-72. (canceled)

73. The dual binding moiety of claim 1, wherein the dual binding moiety comprises a sequence selected from the group consisting of SEQ ID Nos: 50 and 259-301.
